United States Patent Application Publication US 2026/0191916 A1 - sequence listing, part 45

SEQ ID NO: 207 - DNA, 2225025 bp, Streptococcus parasanguinis
  source 1..2225025: mol_type = genomic DNA
gtgtcacaagaagagcaattttggactcgttttttagaattagcccaattacaactaaaagatagtgcgtatgacttttttgtcgccgattcaaaattagttaaaatcgatggagagacagctaccatttatcttgatggtaattataaagaattattttgggaaacaaatctaaaaaacgctttgatcacagccagttttgaagtctacaatacagatttaaaattccagtttatttttgaagatctcgaagaacttcctaacagtcatagcagtgagaataggagactatcttcaggtagcttagcaaccgaaccgttgcctaaaattgatacaggtctgaaatcgaagtatacctttgataattttgtgcaaggagatggaaatatttgggctaaagcagcagcgcttgcagtttctgaaaatcttgcaacaacttacaaccctctctttatctatggtggaccagggcttggaaagactcacttactgaatgcaattggaaatcaaatcctagaaaatattcccaatgcacgggttaagtatgtcccagcagaaacctttattaatgaatttttagagcaccttcgattaggagaaatgaagactttcaagaatacctatcgaagtcttgatcttttattaatcgatgatatccagtcacttggtgggaaaaaagtaaccactcaagaggaattctttaatacttttaatgccctccatagcgacaacaaacagattgttctaacaagcgatcgaagtccagatcatttagatagtctcgaagagcggttggttactcgtttcaaatggggattaacgcaaaatataacaccacctgattttgaaactcgaattgccatcttacggaataaaattgaagatctagactatatttttcctaatgacacacttgaatatctagctggtcagtttgattcaaatgtccgagacttagagggtgccttaaatgatatttccttaatggcaaaggtgaaaaaactaaaagaaattacgatcgatgttgcagctgaagctattcgagctcgtaaaaacgacagtagccagatgcttgtcatccccattgaaaaaattcaagaagctgtaggggctttctatggagtcagtgtaaaagaaatcaaaggttctcgaagagttcagaatattgtcctagcacgacaagtggccatgtatctttcaagagagatgacggacaactcacttcctcgaatcggaaaagaatttggaggaaaagaccacacaactgtgattcatgcctatgaaaaaattaaaagtatggtagacacggatgataatctacgacttgaaatccaaagtatcaagaaaaaattaaattaatctgtggataactttctctaaacctctaggggttattcacatttttttaacaagtaactattcaagtcgtatatagggttccgagagttttccacaattttcacacaacctactattactattaacttactaataataaaataataaaaaggaaagaccatgataaatttctctattaataaaactttatttttacaagcactaaatactaccaaaagagctatcagttcaaaaaatgctattccaatcctctccacgattaaaattgatgtaactccagaaggagttgccttatctggatcgaatggccaaatttcgattgaaaactttatttctatcaaagatgaaaatgctggtttattggtgacttctccaggttctattttattggaagcaactttctttattaatgtggtttcaagtttaccagatgttactttagattttaaagagattgaacaaaaacaggttcttttaacaagtggaaaatcagaaattacacttaaaggaaaagatgcagatcaatatccacgtattcaagaaattgttgcaagtaatccattagttttggaaacaaaattattaaaacaattaattaatgaaacggcatttgcagcaagtgtacaagaaagtcgtccaattttgacaggtgttcactttgttttatcagataataaagatttaaaaacagtggcaactgattctcaccgtatgagtcaaaaagtgattacactggagaaaaatggagacaactttgatgttgtcatcccaagtcgttctcttcgtgaattcacctctgtcttttctgatgatattgaaacagttgaagttttctttgctaacaatcaaattctctttagaagtgaacacattagtttctatacccgtttgctagaaggaaattaccctgacacagaccgtctgattccaacagagttcaatacagaggcaaccttcaatgtggctaaccttcgatttgcaatggagcgtgctcgtcttctttcaaatgcgactcaaaacggaacggttaaattagaattcaaaaatggggtggtttcttcccatgttcattcaccagaagttggacgagtaaatgaagagatcgatactagcgccgtttcaggagaggatttgtccattagctttaatccaacttatttgattgaggcgctcaaagctattgacagtgaacaagttgttattcgctttatttcttctgttagaccgtttacattggttccagaaggaaatgaacaagggttcattcaattaattacgccagttcgcacaaattaacaaaggtgaatcatgtatacgttaggtgattttgtagaaatgaaaaagccacacgcttgtgtgataaaagaaacaggtaagaaggcaaatcgttgggaaattacgcgacttggtgcagacataaaaattaagtgtagcaattgtgatcatgtggtcatgatgagtcgccatgattttgaacagaaaatgaagagagtattatgaaaggttcggtcacttatgtgaccgaaccttttcgattattttaattcttcaaattttccatttttaacttctttgaaaccactttgtttcatcagatctacagttgatttgtagctgatatagtcgacttttttatcttgttgtgttgttactaatttcttttcaattagttgatctaagtctgccttttcataatttagtgttgttttttcaaccatataatcgtctttgtattcagcagaatgtgtgaatcctttgacatccttgtattcttcatcatatttatcgatcatttcctttaattgatctttcgtaactcccgcttctttgtaataaatagtagtggtggtttggttactgatcgctttatctcctttatgttctattgtaatacgaacatctgttttcttttcttggctgattccctgaagataggatttttgaacagattgttgtccacaagctccaagaagaaagagagtaaagatagcaattaaagaaagaaaaatagatttccatgtttgttttttcatctgaaaaactcctttgttcattgttaaatagagtataccatatttatctttttagaacgttacagtttgatgaaaaatctagtttcaaaggtcatgaaatattttatttttcatcacttgtcttttgaattatgttataatgaaagagattgaaatttgaacggagaaaaaagaaaaatggcattaacagcaggtatcgttggcttaccaaatgttggtaaatcaaccctatttaacgcaattacaaaggcaggagcagaggccgcaaactatccctttgcaactattgatcctaatgtcgggatggtagaagttccagatgaacgacttcaaaaattaactgaaatgattactcctaagaagacggttcctacaacatttgaatttacagatattgcggggatcgttaaaggggcttctaaaggagaaggacttggtaataaattcttggctaacatccgtgaagtagatgccattgtccatgtggtacgtgcttttgatgatgaaaatgtcatgcgggagcaaggtcgtgaagatgcctttgtcgatccaatggcagatattgataccatcaatttagaattaattttagccgacttagagtctgtcaataaacgctatgcgcgtgtagaaaaaattgctcgtacacaaaaagataaggattctgttgcggaatttaatgttctacaaaaaatcaaaccagttcttgaagatggaaaatcagctcggaccattgaattcacggaggaagaacaaaaagtggtgaaaggacttttccttttgactaccaaaccagttctttatgtagcaaatgtggatgaagatgttgttgcagatccagactctattgactatgtgaagcaaattcgtgactttgcggcaacagagaatgcggaagtagtggtgatttctgcgcgtgctgaggaagaaatttctgagctagatgatgcagataaacaagaatttttagaggcgattggcctaacagagtctggagttgataaacttacgcgtgcagcttatcacttgttgggacttggcacttatttcacagctggtgaaaaagaagtgcgtgcttggaccttcaaacgtggcatgaaagctcctcaagcagctggaatcatccactctgattttgaaaaaggatttattcgtgccgtgaccatgtcctatgatgatttggtcaaatatggttctgaaaaggctgttaaagaagcaggacgcttgcgcgaagaaggaaaagaatatgttgtccaagatggggacatcatggaattccgttttaatgtataagatagctaaaaaaatgtaaaggttggaaaaaatatttccaacccttttagtgttttgaaaggaaagagatgacgaaattaattgttggattgggaaatccaggtgataagtattttgaaacgaaacacaatgtaggctttatgttagttgatcaaatggtaaagtctttaaatcttactttctcccatgataagatttttcaagctgatatcgcctcaacatttttgaatggagaaaaggtctattttgtaaagccaaccacttttatgaatgagagtggaaaagcagttcatgcccttctgacttattatggtctggatattgaagatcttttggttatttacgatgatttagatatggaagttggcaagattcgtcttcgagcgaaaggatcagctggaggtcataacggaattaaatcgattattaatcatattggaactcagactttttatcgaattaagattggaattggaagacctaagcaaggcatgtcagtggttcatcatgtcttaggaaaatttgataaagacgattacatcactattctacaaacaatcgatcgagtagaagaagcggttaacgattacttggtagaagaaaattttgaaagaagcatgcagaaatacaacgggtaagtagatgaatgtaattgatttagtgagtcaaaactccaaccttctatcctggcaacaaggtttgcaaaaaaataatagggaattgatcttaggattatctgcgaccacaaaggctattgtaatggcttcagcatttgattctattgaaaaagcagtcctcatcacttccagttataacgaagcagaacgattggccagtgattttattgccttacttggagaagagaaagtccatacatttttgggagatgataaccctttagcagaatttgtttttgcttcacaagaaaggcaatttgcacgattagaggctttgaactttttatgtcaagaagatcgtcaaggcatccttgtgaccaatgtgagtggtataaaactactattaccttctcctaaagttttttcatctaatatttttcaattgaaggttggtcaagaaatagacttaactactctgagtgaaacattacagaaaattggctatcaaaaggtgagccaagttttgcagcagggagagttcagtctacgaggagatattttagatatctttgagatcgaacaactccaaccctatcgtattgaattttttggggatgagattgatgggatcagaatctttgaacccgaaagccagcgttctgttgaaaatgtcgaagaaattcaactgaaggcagtgagtgatctattattgcaagaggaagattttatccgtggtcagaagcaaatagaacaattgcaagaacagagcgcgaatgaagaatttaaatcttatctagcagaaattctgggagatatttctcaaaggaaactccatccggatcttagaaaatttattagtttcttttacgagaagcaatataccctattcgattatctccctaaacacactcctgtctttctggatgattatcaaaaaatagcagatcaaatagcgagatttgaactagatacagctaatctcttgacggaagatttacataaaaatagagcttcttctcgccaagtgtattttgcagacaccagtacaacattacgaaaatatacgcctgcaacttatttttcaaactttcaaaaaggattgggaaatctgaagtttgatcatttgtatcaattcaatcaatatcccatgcaggagttttttggacaatttgatttactaaaagaggaaattgaacggtatcgaaaatcaaactatactgttattgtccaagcaacttctcatcacaatcttcaacagctccataaaaatttagaagagtatgggattcgattagattatattgatggggatacgatcattcctcaagctagtcaattagtcgttggaggattagctcacggttttcaatttgttgatgaaaaaattgtctacattacagaatcagagatttatcagaaaaagatcaaacgaaagattcgcaggcaaaatatttccaatgcagaacgcctaaaaaattataatgaattagaaaaaggggactatgttgttcaccaagttcatggtattggtcaatatttgggaattgaaacgattgaaatttcgggtgtccatcgtgattatgtttcaattcaatatcaaaatggagatcgcatctcgattcctgtcgatcagattcagatgttgtccaaatacgttgcaagtgatggaaaagcgccaaaaattaacaagttaaatgatgggcgtttccaaaaaacgaagcaaaaggttcagacccaggtggaggacattgcagatgatttgataaaactttatgctgagcgtagtcaattagaaggatttgcctattccaaagatgatgaaaatcaagaggcttttgaacaagattttccatatattgaaacagatgatcaattacgttccattgaagaaatcaaaaaagatatggaatcgaatcgtccgatggaccgattgctggttggagacgtcggttttgggaaaacagaggtcgctatgcgagcagcctttaaggcagtaaatgatcataaacaagtagcagtgctggttcctaccactgtgcttgcccaacaacattatgctaattttaaggaacgttttgaatcttttgcagtagaggttgctgttttaagtcgtttccagagtaaggcagagcagaaagaaacgcttgaaaagttgaaaaaaggacgagtggatattattattggaactcaccggctcttgtccaaagatgttgttttttcagacttaggcttaatcgtgatcgatgaagaacaacgttttggagtgaagcacaaagaaaccttgaaagaattgaaaaaaaaggtggatgtgcttaccttgacagctacccctatacctcgaactcttcatatgtctatgctaggaattcgagatttgtctgtcatcgaaacacctccgaccaatcggtatcctgtgcaaacttttgtattagagaccaatccaaccattattcgagacgctgtgttgcgggagatggatcgtggaggacaggcctattatctttacaataaggtagatacaattgaacaaaaggtgtctgaattaaaagagttgattccagaggcttcgattggctttgttcatggtcagatgagtgaagttcgcctggaaaataccctgttggatttcattaatggcgaatacgatgtcttagtgacgacaaccattattgagacaggtgtggatattccaaatgccaatacactctttattgaaaatgcggatcatatgggactttcaactctttatcaactaagaggtcgtgtgggacgaagcaatcgaattgcttatgcttatttgatgtatcgtccagacaaatctcttacagaagtgtctgaaaaacgtttagaagctattaagggttttactgagttggggtctggatttaaaattgctatgcgagatttatcgatccgtggagcagggaatatccttggagcttctcaatctggtttcatcgattcagttggttttgaaatgtattcccaattgttagaagaagctattgctaaaaaacaaggccaagagcatcgcaggcaaaagagtaatgcagagttgaaccttcaaatagatgcgtatttacctaatgaatatatttcagatcaacgtcaaaaaattgaaatttacaaacaaattcgtgaaatgaattctgcgactgactatgaatacttgcaagatgaattgatcgatcgttttggagaatacccagatgttgtcgcctacctacttgaaattggcttagtgaaagcatacttggatcaagtctttgtccgtcttattgagagaaaacaacaaaaagtgacagtgaaatttgaacctattgcaaaacaattgtttttaacacaggattatttcaaagctctgtcaatgacgcagttgaaggcacagattgcagaagaaaagggattgattgaagtgatcttcgatattcgaaataagaaagattttgaaattttagaagctctgaagcaatttggtcaaaccttattggaaattaaacaggaaaaagaagaggactacagttcttagctcatttttcgcattttatgtataaaaaatgatacaatactatgttagaggtgacagtatgagattagataaatatttaaaagtttctcgcattattaagcgtcgtcctgttgcaaaggaagttgcagataaagggcgaatcaaagtcaatggagtattagccaaaagttcaacggatttgaaagtgaatgatcaaattgaagttcgttttggaaataaagtattgacggttaaagtcttggaaatgttggatagtacaaaaaaagaagatgcatccaaaatgtacgaaataattagtgaaacaaggatagaagaagatgcctaaaaatatcgttcaaatgaacaataaatatatcaaagacgaaagtcagcgaaaacgttttttagaagaagaaagaaaaaaacgcaatcgttttctggggctcgttttgatattggtcatgttactgtttattcttccaacttataatttagcccagagctatcaatcgctacaagataaaaaagaacaatataaacagttggaaaaagagtataaagaaacaagtgaacaaaaagaataccaacaagacatcgctaaaaaattaaaagacgatgattatgcaacaaaatatgcacgcgccaagtattctttttcaaaagatggtgaatatgtttataccatcccagatttactcccccaataaccgatggaaaatatcttacaaacagttaaacaatttcttgaattttcggatgaaaaattagaggaattaaaaaagaaaaaccaaatggtcaaacttcaaaaggatgaaaaggaaaggaatacaagtgtctaaacgatttctgctcctattgttagttccaattttatttattgggtctcaagcagcgagtgtcgagcagtctgagtcttctcagacaatggctcatccatcagaaatttatttttcttcaattccagcgaaccctaatgtctatcgcaaaatttctgttttttctgatcctcagttgaaaaaagcaaaaggagaaattcttcccaacacaccgtttacaatcgaacaactctttgtaaatgatgaaaggaaagctgtatttaaaatagcagataaaggatatgtattagcagattcttctgtcattttttctgatgttgtacaagaaacacaagaaaaaaaacaagccatgtggctaaaacctggttttaaagtgtacgaccgacccttaataaatggtgcacaagaaaaaaatacacctctttctccttatacaaaagtgacagtcttacgtacagctaagactttacgagatgagtttgtggagattgaaggtcagggctgggtgaacaaagcattcgtcactgaaaaagataatcgaatggaaaaagttcaggacttgttaaatagtaaatacaattctccttcgtatggaatctatgtaaaacaattagagactggaaatactgctggaatcaatccgcaaaaagaaatgtattctgccagtgtaacgaaattaccatacttgtactacgtccaagaacagctcaataaaaaagccatttctccaactacaacctacaaatatattccagaagtaaatgatttcaaaggaggctatgaaccagaaggaagtggtagtctttcaaaaacaccagatggaaaagaatatagtgttcaagagttgatagataagattgcaaaagaatcagataatgttggacataatatcttgaattattatgtcactcatcaatcagatcaagacttccaaaaaacattggataaaattgcaaagaaacattgggatgttgaaaaaagagaagcatccgctgaaatggctggcaatgtcatggaggctgtctatcaacaaaatggccctattattgatgcgctctcctctacaaaatatgatgatcaacggattgcgcgtgaccttccagtaaaagttgctcataaaattggagatgcctatgattttagacatgatgttgcgattgtatacacaaattcaccctatgtaatagccatttttacagatcattcgaattatgatacgatttccaacatttcaaaagatatctatgaggtattgaaataatggaaaagcgatttttagagttttgtgaaaaacaagatctatttactccccatcgccgtgttttggttgccttatctggtggattggattcaatgaatctgtatgaacttttatataagaataaagaacgattgaaaatccatctggtactcgctcatgtcaatcatggacaaagaccagaatcagatttagaagaaagtgaacttcgaacgctagctgataggcgagagacacgtattcatgtggctcactattcgggtgattttacggaagcaaaagctcgtacctttcgttatgatttttttaaacagattatggagaaagaggattgcaccgctttagtaacgggtcatcatgcaaatgatcaagctgaaacaactttcatgcgcttgatacgaggaacaaaattacgccatttaagtggtattcctgtacgccaaccatttggcaagggtgagttaatccgtcctttgttaacttttaccaaagatgagttgatgaaaatccctcactttgaagatagtagcaatgactcacaggactattttcgaaatcgtgtacgccatcaataccttccagaatttgaaaaagaaaatccccaaatgcaagtaagtcttcgttatttagcagaggaagtgactcattggcaccaagcactgaaagaattgactagcgagttaaccattcaagatttatcttcttttagaacgtattctcattctgtacaatcattcttattagaagagtatctggcacaatttccagatttgcaacttggtagggtacagtttcaagaattattagatttactgcgaaaaaaaagaaattgcgttcattatttaaagtcgaattatgaactacatcaagaatatgatttctttaaaatacaaaaaatcagtcaaaagtcggatgaccaccccctcccatttttgttagaatttgggaatatctttgaaattgcaaattataaactatcttttggacaaccattagtaggggaaaatgtagaaattctttctgtttcacgcgaaactcccatcttaattagaaggagaaaggaaggagatcagctgcttgttaatggccaccatcaaaaattaagacggtggttcatcaaccataaaattccaatttctcttcggcaaaaggctctcattatagaacaaaatcataatattctttctgtagtgggattggtaacgagtgatttgagtcagccctcaaaaagtggtataatgaaagatagtctttatattcaaaaaatagataggtaaaaacatgttagaaaaagatataaaaaaagtattagtttcacatgatgaaattgtagaagcagcaaagaaattgggtgaaaccctaacaaaagagtaccaaggaaaaaatccaatttttgttggaattttgaaaggctctgttccatttatggcagagttgatcaaccacgtagatacacatattgaattggattttatgctggtttcaagttatcatggtggtacagcaagctcaggtattattaatattatcaaggatatcgaccaagatattactggtagagatattttatttgtagaagatattatcgatacaggcaaaaccctcaagagtctgaaagaactctttgaagaacgaaatgcagcatctgtaaagattgctaccttactggataaacctgagggacgtttggttgagattgaagcagattacacttgctttacgattccaaatgagtttgttgtcggatatggtttagactatgatgaaaattatcgtaacttaccatatgttggtgtattaaaagaagaagtgtactcaaaatagaggagactagatgaataacagaaaaaacaacggttttgttcgaaatccttttctgtatttgttgattattgtagcggctgtgacaggattccagtacttttttgcgggtaatggagttggtcaaagtcagcaaatcaactacacagaattggtcaaggaaattaaaaatgacaatgtaaagacgattagttaccaaccgaatggtagtgtgattgaaattgcagggacctataataaagcaaaagaatcaaaagaagatacaggaattcaattttttaccccaagtgttcaaaaagtatctcgctttactagtgtcatccttccatctgatatcaccgtcaatgaattacaaaaattagcagctgaccacaaagcagaaatcaccatcaagcgtgagagctcaagtggcatgtggataacaattctcacttcaattgttccatttgttatcgtcatgttcttcttcttctctatgatgaaccaaggcggtggcggaggtgccagaggcgcaatgaactttggtcgcaataaagcccgcgctgctaataaagaagatattaaagttcgtttttcagatgtagcaggagctgaagaagaaaaacaagaacttgttgaagtagttgagtttttgaaagatccaaaacgctttactaaattgggagcaagaatcccagcaggagtgcttcttgaaggccctcctggaactggtaaaacccttttagcaaaagcagtagcaggtgaagccggagtaccattcttcagtatttcaggttctgacttcgttgaaatgtttgtcggtgtcggtgcaagccgggttcgttctctatttgaagatgccaaaaaagcagcaccagccattatctttatcgatgaaattgatgctgttgggcgccaacgtggtgtaggtcttggtggcggaaatgatgaacgtgaacaaaccctcaaccaacttttgattgagatggatggttttgaaggcaacgaaggaatcattgttatcgcagcaactaaccgttctgatgtccttgaccctgcccttcttcgtcctggccgttttgaccgtaaagtattagttggacgtccagatgtgaagggtcgtgaggcaattcttcgtgttcatgctaagaataagccgcttgctcaagatgtggacttaaaattggttgctcaacagacaccaggatttgtcggtgctgatctcgaaaatgttttgaatgaagcagccttggttgcagctcgtcgaaataaaaaagtaattgatgctgctgacatcgatgaagcagaagatcgtgttattgcaggtccatctaagaaagatcggacgatttcacaaaaagaacgagaaatggttgcttatcacgaagctggtcatacaattgttggtttggtcttatcaaatgctcgtgtggttcataaagttaccattgttccacgtggtcgcgcaggcggttacatgattgcccttccaaaagaagatcaaatgttactttctaaagaggacatgaaagaacaattagcagggctcatgggaggacgtgttgccgaagaaattattttcaattcgcaaacaacaggtgcttcaaatgactttgaacaagcaacccaaatggcacgtgcgatggtaacagaatatggtatgagtgaaaaacttggaccggttcaatatgaaggaaatcatgcgatgtttggtgctcaaagtccacaaaaaatgatttcagaacagacggcttacgaaattgatgaagaagttcgtggtctattgaatgaagcccgtaataaagctgcggaaattattcaaggaaatagagaaacgcataaactgattgctgaagctctattaaaatatgaaaccttggatagtgttcaaattaaatcattatacgaaacaggaaaaatgcctgaaaattcagagcatgaattagaagaagaagcaaaacctctatcatatgatgagattaagtcaaaattagaagaaaacaactaatttaaaagaaggaaaatatttccttctttcagaacgtagacaaaccctaccagcaatagaaacattgctattttgtaggttgggtaccatatagtgaaaactcttaggaatgctgatatcgcgctattcttaagagttttttactttctctatttttaaaaaaagactgaagaaaatcgtccaaaatgggcttttccttcttttttattaaaaaagtgttgacagagtaaaaatattctgtataatagaatatgttgtaaaaatggtccgttggtcaaggggttaagacaccgccttttcacggcggtaacacgggttcgaatcccgtacggactattgataaactgtcaccaagtggcagtttttctttgtatttggacaaaatagttaaaataatgaccaaatagttgaaaaaacgtgcagaatagaaaaaaagtccattgggcttctttatttttataaaatacagataaaagtaaaggagagcttatggaatttaataaaatgtatcaaaaagtaaaatatatcgtaagaaaatgtgaaaaggaatattatattcagttatgggaaaaggatgattgggaacaagaaggacagctaactctctttgaactttatcaaaaaaatcctgaaattgaaacaaatgaagaattactttataaatactttaaaacgaaatttagaaatcatattaaagataaaataagacaacaggaaagtgataaaagaaaaataaatagacttccctatgttgaaataggagaaattagccacagaatttcatcaagagaaatatatttagatgagttggttgtactaagagattctttaaaacgttttaaagaaaaattaacagtaaaagaaaaagaacaatatgaagcattactaacaaacagaagatgtctaggaaaaacaaaaatgaaaaagaaattagaaaactatctaaaagattttaaaaattctatttaaaaacaaaaagttaaaagagttaaaaaaacttgccctgttgtaaaatgaagtgcaacaaaaactctaagcaggcagagcctgctaactcatgacagaaaagaaagttcggcttataatgaaggtgaacaatacaaatccgtggtctttaatagggctttgcctagcctgtaacaaaaactggatgaacaagagtcatgagataactcgaatatgccttgagcacgaaaataaaattattaatagcctcttgttctattgttcaatagttaacaggaggtttttgtaatggaagttatgattgaaacttcttgtggaattgatgtccaccaaaagtctatcgtttgttgtattctagatggtccactagaaagcaataaacctaaaaaaattcagaaaaaatttggtacaacaactatagctctccaaaacgccttagattggttattggaaaatcacgtcacacatgtcttttttgaaagcactggccaatattgggtgccgctctttaatattttttcagactcagaactcaatttaatattagctaaccctcaacatatcaagaatgtacctggtcgaaaaacagacatgaaagatgcagaatggattgctcaactcggacgttgtggacttattgagccatcttacattcctaaccctgaagtgatgcagttacgtttactcactcgtaggctacgttcttataagcaacgtcaaacccaaataaagaatgagattcataacctcttacaacgtgctaatatcaaactaaccagctatctttctgatatcttctctaagacaggacagtctcttttaacgctctttatcaatggggaactcattgattatgacaatgtgacagcttgtattcacaagcatgtcaaagcaagtccagaagaattaatggaggccatgaatgggaagttgtcactggaagatcgatttctcttggctcaaagcctagaagaatatcaattgtatcaaaaactcatgaataaattaacgagtgaaatgatagcttatatcgaaaaggagttcccctgaagaaaatagattacttcaaacgatccctggtgtgagtgagacctgtgcagccactattttagctgagattggaccagatgtgaaggcttttcaatcggacgcacacctagcttcttgggctgggctctgccctggttcatacgaaagtgctggcattaaaaaatcctcgcacatcacacaaggaaatcgttacatcaaacaggcactgacaatgtctggattgattgcggctcactctaaagacagcgtgttttcatctttttatagcaaaatttcccaaagaggaagtaagatgaaagccgtcattgcttgcgcacataagttgcttcgtatcatttacaaaattcttgcaacacaccaagaatacgacaaagaaaaagtgctaggactgaggcaacagttctaacaccaaaaatttaaaaaatctcaattacagtatagcacaagaagagttttttgcgctatttttgatgttttttttcaaataaaaagacatgttcatctgacatactagagttgcgaaaaacagtataaaggaaaatgaacgtgtccacaaattattctaccacaaatcaagcctacaaacacttatctgaagctgaacgaggaaaaattgaggcttatttatgctcaggaatcaaacctgcggaaattgctcgtcgacttaggagaaccttctattctgaccttggtagaatgacaaacatgttatgctatcacaaagaaactcgtaggaaagaagacagagtatgtcaatcaagacgtattagagtctatgaagttttacccaattaagtccatcactgcggaaaatggaaacgaattttctttattgggtgagatagagggcttagatgtttattttgctcatgcctattcatcttatgaccaaggtacaaatgaacatttcaatggactactaagagagttcatttcaaagggcatcaatgaaagaccgagacgaatccttggttatcagtccgcaaaaaaagctgtttgagctaaatcaaacagcttgagaaaaactcacttaatcagagcgacacctttgttgtacttgacttgacaattgggaagtaaaaaactttcaaaaaaaataaaaaaaaattaaaaaaagtgttgacagtaaggagaggtcatgatatactaatatagttgtcgcgagagagcggcaaagacctttgaaaactgaacaagacgaaccaatgtgcagggcactacaactgaagttgtagtaactgaacaataaaaaacaataaatctgtcagtgacagaatgagtttaagacaaacaattattttaatgagagtttgatcctggctcaggatgaacgctggcggcgtgcctaatacatgcaagtagaacgctgaagcttggtgcttgcaccgagcggaggagttgcgaacgggtgagtaacgcgtaggtaacctgcctcttagcgggggataactattggaaacgatagctaataccgcataaaagtcgacattgcatgatgttgacttgaaaggtgcaactgcatcactaagagatggacctgcgttgtattagctagttggtgaggtaacggctcaccaaggcgacgatacatagccgacctgagagggtgatcggccacactgggactgagacacggcccagactcctacgggaggcagcagtagggaatcttcggcaatggacggaagtctgaccgagcaacgccgcgtgagtgaagaaggttttcggatcgtaaagctctgttgtaagagaagaacgagtgtgagagtggaaagttcacactgtgacggtaacttaccagaaagggacggctaactacgtgccagcagccgcggtaatacgtaggtcccgagcgttatccggatttattgggcgtaaagcgagcgcaggcggttagataagtctgaagttaaaggctgtggcttaaccatagtacgctttggaaactgtttaacttgagtgcagaaggggagagtggaattccatgtgtagcggtgaaatgcgtagatatatggaggaacaccggtggcgaaagcggctctctggtctgtaactgacgctgaggctcgaaagcgtggggagcaaacaggattagataccctggtagtccacgccgtaaacgatgagtgctaggtgttgggtcctttccgggactcagtgccgcagctaacgcattaagcactccgcctggggagtacgaccgcaaggttgaaactcaaaggaattgacgggggcccgcacaagcggtggagcatgtggtttaattcgaagcaacgcgaagaaccttaccaggtcttgacatccctctgaccgctctagagatagagctttccttcgggacagaggtgacaggtggtgcatggttgtcgtcagctcgtgtcgtgagatgttgggttaagtcccgcaacgagcgcaacccctattgttagttgccatcatttagttgggcactctagcgagactgccggtaataaaccggaggaaggtggggatgacgtcaaatcatcatgccccttatgacctgggctacacacgtgctacaatggctggtacaacgagtcgcgagtcggtgacggcaagctaatctcttaaagccagtctcagttcggattgtaggctgcaactcgcctacatgaagtcggaatcgctagtaatcgcggatcagcacgccgcggtgaatacgttcccgggccttgtacacaccgcccgtcacaccacgagagtttgtaacacccgaagtcggtgaggtaaccttttaggagccagccgcctaaggtgggatagatgattggggtgaagtcgtaacaaggtagccgtatcggaaggtgcggctggatcacctcctttctaaggaaaaggaaccctgtacgttggtcttgtttagttttgagaggtcttgtggggccttagctcagctgggagagcgcctgctttgcacgcaggaggtcagcggttcgatcccgctaggctccattaacactatagtagtgttaaacttgaacattgaaaattgaatatctatatcaaatagtaacaagaaaataaaccgaaacgctgtaaatatttaaagagtttaggtcgtaagaccaaaaataaggttaagttaataagggcgcacggtggatgccttggcactagaagccgaagaaggacgtgacaaacgacgaaatgctttggggagctgtaagtaagcgacgatccagagatgtccgaatgggggaacccactagctaatggctagtactcctatctgttaaggataggtagaggaagacgcagtgaactgaaacatctaagtagctgcaggaagagaaagcaaaagcgattgcctgagtagcggcgagcgaaacggcaggagggcaaaccgaagagtttactcttcggggttgtaggactgcaatgtggacttaaagattatagaagaatgacatgggaaggtcagccaaagagagtaagagcctcgtaatcgaaatagtctttatacctagcagtatcctgagtacggcgggacacgagaaatcccgtcggaatctgggaggaccatctcccaaccctaaatactctctagtgaccgatagtgaaccagtaccgtgagggaaaggtgaaaagcaccccgggaggggagtgaaatagaacctgaaaccgtgtgcctacaacaagttcgagcccgttaatgggtgagagcgtgccttttgtagaatgaaccggcgagttacgatatgatgcgaggttaagttgaagagacggagccgtagggaaaccgagtctgaatagggcgcaatagtattatgtcgtagacccgaaaccatgtgacctacccatgagcaggttgaaggtgaggtaaaactcactggaggaccgaaccagggcacgttgaaaagtgcttggatgacttgtgggtagcggagaaattccaaacgaacttggagatagctggttctctccgaaatagctttagggctagcgtcgacattaagattcttggaggtagagcactgtttgggtgaggggtccatcccggattaccaatctcagataaactccgaatgccaaagaattatggtcggcagtcagactgcgagtgctaagatccgtagtcgaaagggaaacagcccagaccaccagctaaggtcccaaaataattgttaagtggaaaaggatgtggggttgcacagacaactaggatgttagcttagaagcagctattcattcaaagagtgcgtaatagctcactagtcgagtgaccctgcgccgaaaatgtaccggggctaaaacaatttaccgaagctgtggatacctttataggtatggtaggagagcgttctatgtgtggagaaggtgtaccgtgaggagcgctggaacgcatagaagtgagaatgccggtatgagtagcgaaagacaggtgagaatcctgtccaccgtaagactaaggtttccaggggaaggctcgtccgccctgggttagtcgggacctaaggagagaccgaaaggtgtatccgatggacaacaggttgatattcctgtactagagtatgtagtgaaggagggacgcagtaggctaactaaagcgtgcgactggaagtgcacgtctaagcagtgaggtgtgaattgagttaaatgcttaattctgtaacattgagctgtgatggggagcgaagattagtagcgaagttagtgacgtcacactgccaagaaaagcttctagcgttaatcatactctacccgtaccgcaaaccgacacaggtagtcgaggcgagtagcctcaggtgagcgagagaactctcgttaaggaactcggcaaaatgaccccgtaacttcgggagaaggggtgctggctttgagtcagccgcagtgaataggcccaagcaactgtttatcaaaaacacagctctctgctaaatcgtaagatgatgtatagggggtgacgcctgcccggtgctggaaggttaagaggagtgcttagcgtaagcgaaggtatgaattgaagccccagtaaacggcggccgtaactataacggtcctaaggtagcgaaattccttgtcgggtaagttccgacccgcacgaaaggcgtaatgatttgggcactgtctcaacgagagactcggtgaaattttagtacctgtgaagatgcaggttacccgcgacaggacggaaagaccccatggagctttactgcagtttgatattgagtgtctgtgccacatgtacaggataggtaggagccatagagatcgggacgccagtttcgatggaggcgttgttgggatactacccttgtgttatggccactctaacccggtaggtttatcatctacggagacagtgtctgacgggcagtttgactggggcggtcgcctcctaaaaggtaacggaggcgcccaaaggttccctcagaatggttggaaatcattcgtagagtgtaaaggtataagggagcttgactgcgagagctacaactcgagcagggacgaaagtcgggcttagtgatccggtggttccgtatggaagggccatcgctcaacggataaaagctaccctggggataacaggcttatctcccccaagagttcacatcgacggggaggtttggcacctcgatgtcggctcgtcgcatcctggggctgtagtcggtcccaagggttgggctgttcgcccattaaagcggcacgcgagctgggttcagaacgtcgtgagacagttcggtccctatccgtcgcgggcgtaggaaatttgagaggatctgctcctagtacgagaggaccagagtggacttaccgctggtgtaccagttgtctcgccagaggcatcgctgggtagctatgtagggaagggataaacgctgaaagcatctaagtgtgaaacccacctcaagatgagatttcccataactatatgttagtaagagccctgagagaagatcaggtagataggttaggagtggaagttgtgtgagcaatggagcggactaatactaatagctcgaggacttatccaaagagtcgaaagatattgacaacgtaagtttaacttgttaaaatatagatattcaattttgaatgtttaaacattcagagttaagtgacgatagcctaggagatacacctgtacccatgccgaacacagcagttaagccctagaacgccggaagtagttgggggttgccccctgtgagataaggatgtcgcttagcaagagattgagcctagatgatctaggctcatttgggagtttagcttagttggaattgagaggcaatcgagattccaatcggcggataagagaaacgaagtttctcaccgttggctgagttaaacgaccatttgggagtttagctcagctgggagagcatctgccttacaagcagagggtcagcggttcgatcccgttaactcccataggtcccgtagtgtagcggttatcacgtcgccctgtcacggcgaagatcgcgggttcgattcccgtcgggaccgttaggataatgaaaattattttaagactcgttagctcagttggtagagcaattgacttttaatcaatgggtcactggttcgagcccagtacgggtcatattttgcgggtttggcggaattggcagacgcaccagatttaggatctggcgctttacggcgtgggggttcaagtcccttaacccgcatagaagaataataatgagccggcttagctcagttggtagagcatctgatttgtaatcagagggtcgcgtgttcaagtcatgtagccggcatttttttatataaagaaagcgatgcgaacgtagttcagtggtagaacaccaccttgccaaggtgggggtcgcgggttcgaatcccgtcgttcgcttgaggaggccggggtggcggaactggcagacgcacaggacttaaaatcctgcgattggtaacgatcgtaccggttcgattccggtcctcggcatagatttaggttgaaagaagcacccttagctcaactggatagagtacctgactacgaatcaggcggttagaggttcgactcctctagggtgcatggtcgtgagactatgtaagaatagaataagaaagagcacccttagctcaactggatagagtacctgactacgaatcaggcggttagaggttcgactcctctagggtgcataaggcgaaagctttagatcgggaagtagctcagcttggtagagtacttggtttgggaccaaggtgtcgcaggttcgaatcctgtcttcccgatattatggcggtgtagctcagctggctagagcgtccggttcatacccgggaggtcgggggttcgatccccttcgccgctatattgttgatcttgttggacctttagctcagctggttagagctctcggctcataaccgagtggtcgtaggttcaagtcctacaaggtccattataagttttggaggattacccaagtccggctgaagggaacggtcttgaaaaccgtcaggcgtgtaaaagcgtgcgtgggttcgaatcccacatcctcctttttaaattaacgcgggatggagcagctcggtagctcgtcgggctcataacccgaaggtcgtaggttcaaatcctgctcccgcaatttggctcggtagctcagttggtagagcaatggattgaagctccatgtgtcggcggttcgattccgtctcgcgccatttcctttattaataagcgggtgtagtttagtggtaaaactacagccttccaagctgttgtcgcgagttcgattctcgtcacccgctttgaacaattgttcatttattaccaagttgtttaacttgggcgcgtagctcaggtggttagagcgcacgcctgataagcgtgaggtcggtggttcgagtccactcgtgcccattttggagaattactcaagaggctgaagaggacggtttgctaaatcgttaggtcgggtaactggcgcgggggttcgaatcccccattctccgtataactatgaagtttgagataggatctcaaactattttttgtatttttgtaggttttttatgttattgaaacgtttttttaagatatttagtctcttgtttgttttagttgtagcaggggttctgtttttattcccatcagttagaaatactattgttataaaatcttctgattttttaactatttttgatcaagctatttctattccgttttctgtgattgagtctaagtcaaatgacattaaaaatttatctaaaattaatgatgaaaatatttctttaaaatctaaaatatatcagatagatattaatcactctaaactaaatcgtttagagtctgaaaataaagagttaaaggatttattgaatttaaaaaattcggtatcaggttcaaaacaagttgttggggagattgttgacagaaattacagttcttggaatgaacagtttgtgattgataaggggagttctgatggaatttcagactcaatgtttgttctttcttcagggggtgttatcggagttgttgataacttggagaaaaactctagtagaattaaattactggttgggaatgatatttcttctcaacatttgacacttaagattgaagataaaacacagtctatttttgctttattaattggctttgatgataaaacgggtgaatttcgtttgctgcaaattggtgattctgttgacattaaaaaagggtctcttgtttcgacaagtgggcttggtaaatataagaccagtgatttacctgttggtacggtatcttcagtaaaaaaagcatcagatcagttaggacaagaaattagagtaaaacctaaagcaagtttggatgttaatcgttatgtacttctgattggagaataatgtgagattattacgcaaatactatttttttcctttgttattgtttttgtctttgtttattgatgggcaattttctttcattttctcgcgttttattccaaatcaatttgaagctatttcatttctatttttttatggctttatgatgttgagtctctatttttcagagatatcttgtatttggttgggtattttctttggtttttgttttgatgtgtattttctaaatactcttggaatctcctttttgctatttccattattacaaataatattttatcattggaatcaagttattctacttaatcgtttcactcgctttttaacatttttactaacgattttttgttttcaacttcttgcttcatttcttgagatttttttaattggtattaaatttgatttattttcgttagttgtttttcaaattgcaccaagtttacttttgaatttatttttattactgatttttcaacctctatttgaaaagatttatttataaattcgaaacaaaaatgtaacaatagcgtaacataaattagtgataaaatttgttatactagttagtgtcttattggaaagggaaaattatctaatgaagaaaaaattatttgctacaatcttgttgagtacagttgccttgtcacaaggtgctgtggtagctggtgtgtcagctgactccacagatgataagattgctgctcaaaataacaaaatcaatagtattaaccaacaacaacaaagtgcacaagctcaagtagatcaaattcaaggtcaagtatccgaaattaaaaagcaacaagcggatcttcaagctgaaaatgatcgattgaatgaggaatcagaaaaattgtctgctgagattgatgagttatcaaaaaatattgttgctcgtcaagagtcgcttgcaaatcaagcacgtagtgctcaaacgactggaactgctactagctacatcaatgcgattgtgagttctggttctttaacagaagctatttcacgtatttctgctatgaatgaaattgcagatgctaacaacaagatgttgcaagagcaaaagcgtgataaagaagatattgctcagaaacaaaaagaaaataatgatgccatcaatactgttattgcaaacaaacagcaattagaagatgatgcgcaggctttgactacaaaagaagctgaattgaaagtggcacaattgaacttggcggctgaaaaatcgactgctgaaaatgaaaagaatgctttgttgcaacaaaaagctgaggctgaaaaagcagcggcagcggcagcagcagctgaagcagcttaccgtgctaaacaacaagaacaacaagctgctgtgaaggcttctgctaatacgactcttcaagcacaagtacaggcagcagcacaaacacctgctactgcttcagcagcacaaccagttgctcaaactcaagcaacagctcaagcggcaactgtttctcgtcaaacatatagttcatctgcatcatcttatccagttggtgaatgtacttggggtgcgaagacattggctccatgggctggcgattactggggtaatggtggtcaatgggcagcaagtgcagcagcagctggtttccgtactggatctcaaccacaagttggtgcgattgcatgttggaatgatggtggttatggacacgtagctgttgttacagccgttcaatctacaacaagtatccaagtctctgagtctaattatttaggtaatcgtagtattggtaactaccgtggatggtttaatccagttaatgctcaaggtactgttacttatatctatccaaactaagaataacattgaagtagaacattagttctgcttctttttttgagagaatttaggtagtgatagattttataatttccataaattaatatttgaatatttgcttaaaaagcgataaaatggttacaggagaaatttgtgctgactgtacaatttggttttagattttagtggaggaaatcatgtcattttctgatttaatgctctttgccttgtcgtcaaatcaagaattggctcaacgtgtgtctcgtgaaatgggactaccgcttggaaagtcaacggttcgtcaattttctgatggagaaattcaggttaatattgaagaatcaattcgtgggaaagatgtttatattttacaatctactagctcaccggttaacgataatctaatggaaattttgatcatggtagatgcgttgaaacgtgctagtgcgcaatctattaatgtggtgatgccgtattacggctatgctcgtcaagaccggaaagctcgagctcgtgaaccaattacttctaagttggtagccaatatgcttgaggttgctggagttgatcgtctgttgacaattgatttgcacgctgctcaaattcaaggtttctttgatattcctgtggaccacttgatgggagctcctttaattgctgattatttcgagcgacgtggtatgattggaaaagactatgttgttgtcagtccagaccatggtggagtaacccgggcacgtaagttagctgagtttttgaagacgccaattgcaattatcgacaaacgtcggagtgttgataagatgaatacgagtgaggtcatgaacatcattgggaatgttgaaggtaagacttgtattttaattgatgatatgattgatacagcaggtacgatctgccacgcggctgatgctcttgcagaagccggtgctgttgaagtctatgcgagctgtactcaccctgtcctatcagggccagcgatggaaaatattcaaaagtcagcgatcaagaagctggttgtcttggatacaatttatttaccagaagagcgcttgattgataagattgaacaaatttcgattgcgaaacttcttgctgaggctattattcgtattcatgaaaatcggccactttcacctttgtttgaaattggaaatgcgaagaaatcttaaaaataatgaagaggctggggaactagtctcttttttaggaaaggagatgttatgaaagtagtagaatggtggcagaaacgggaaaaagaaaagaaacagaaaaaatttctcactgcagctcaaaagttagaagctaaggcggatccgagtttaccgaagaaaagattaccaaagaatggtgcagtgaaataaacaaaccaaatatgaaagacatcgttgggcggtttctgaaagaatgatagtaaatatcatggaacgattcatgaaattgttttggataggtatttgaaagaatgaacaggatgtaatataaacaaccaaatacttagtggaaataaggatttatcactattgtgaagctgtaggaagtgtattcggaatggctctcaaatcttgtatgttttgcatttaaataaatagaaatcttaaacttttttaaaaaaataagaaaaaaagtcttgacaaaggaagaatatcctagtatactagtcatagttacgaagtaacgattaatttttgaaaagaaaaaaggagataaaacaatgaaaaaagttttattatcatcagtagcagctcttgcagtatttgctgcagcagcacctgtatttgcacaaggtgaaaactcaaatgcatctaaccaattgatccaaaagaaatatgtttcttggcgtgatgcagcagatgaagctaacactcaagtagcagctcatgaagcagaaatcaaagaagaaactcttcgtcaaccagatgttgtaaaggcacaacaagctcttgatgcagctaatgcaattgttggtcataatcatgaaaaagcagttcaagatgctcaagaaaactataacactgcttataaagatgcatacaacacagtacgcaaccgttacatccaagttcttcaacaaaaatacattgaagctgctaaagctcaaggtaactactacgatgaaacagctgtagaagctaaccgtacaaatgaacaacgtattgcagatgacatcaaagctcaaactggtaaagatgttactgttactacagatgaaaaaggtaacgttgtagttaaagacgaaaaaggtaacgttattggtactgttgacaaaaacggtaaactagttaaagctgatgctaaagctgatgctaaagctggtaaagctcttccaaaaacaagcgcagttaaataatttgattattaattagctcgaaacgaatatcactgagtcctagggctcagtgatattttttagagaaaaaatcgtcataaggagatcaatgaaatgaaaagagctgagaaaaaagcttcaaataaattggcagggatcatgattgctcttgctgcagttgtcgtaattgttgctggttttattttcttcaatccatttgggggagggaaatcttctagcacagctaaaaagacaactagtacaagctcaaccaaacaagcagctaaatatgaaccaagtcaagaagaaaaagattatttaaaaaatcgttttgcccaattaactgcggttaatccagaaacaattggttatgtttatgcaccaggtactgaattggatgaaccagtagttcaaacgactgataatgaaacctatttgaataagacttttgatggtgggaacgaacctcttatgggaactgttttcatggatacagataacaaaaaggactttagcgatcgtttgacgtggctcttcggtcatgcacgtggcagtaaagttgcagatcatcgtatgtttaatgatgttaatttctatgataaacaagattattttgaccaacatccctatgttgtgattgaaactcctgatcgtaaatattactacgaagcgatgtgcttggttatcgtcccagaggatactgccttttatcgtacaagctttacagatgataaagactttacaacgcagttaaaaaaagtttacgaagatgggcaaactaagaatccaaatatcaagatcaaggcatctgataaatatttggtattgtcaacttgtcgtgaagaggatgaaaccattcgtgcgaacctttatcttcgtcaaatccctgattcagaaatgaaggattttgtggcgaaacatgcagatcaattgaaatatgtggcaacacgtgatcaacaataataacaaaaaggcttaggccttttttgttatgtccagtatttgtaggaaatgtcttgtaatctgttcatctatcttctttttatcatatatctagcaggttgggcctttgcgatggacttccatttatagtataatgaatataagtgtttttggaggtgttttatggatttaacgaaacgttttaataagaatctaaatcggattgaagtttctttgattcgtcagtttgaccaatcaatttcttccattcctggagtcttgcgtttgacgttgggagaacctgattttacaactcctgaacatgtaaaagaagcaggaaaggctgctattgacgcgaactttagtcattatacaggaatgagtggcttgctggctttgcgtgaggctgcgagtcagtttgtgggtgataaatatggtattcactatcgtcctgaggatgagatattggtgacgatcggtgcgacagaagccctgtctgcaaccttgacagcaatcttggaacctggagatgtagtgctactcccagcaccggcctaccctggttatgaacccattgtgaatttggttggggcggagattgtcgagattgatacgacagcagatcgttttgtcttgactcctgaaaagttggaaaaggctattctagagcagggtgaaaaattgaaggctgttattctcaattatccagctaacccaacgggtgttacttattcgcgcgaacagatggcggaattggctgctgtcttaaaaaaatatgaagtctttgtgatttgtgatgaagtctattcagagttgacttatactggagaagcgcatgtctctatggcatccttcattcctgagcagaccattgtcattaatggcttatctaagtctcatgccatgacaggatggcgccttggctttatctttgccccagctgtattgacagcccaactcatcaagagtcatcagtatttggtaacagctgctggaactatgaatcagtatgctgcgatcgaagctttgacggaaggtcgggatgatgcagagccgatgaagaaggaatatgtgaagcgtcgtgattatattattgaaaagatgtcttcgcttgggtttgagatgattaagccagatggagccttttatatttttgctaaaatcccagctggttacaatcaggattcctttgctttcttacaagattttgcgcgtgaaaaagcagttgcctttattcctggtgctgcttttggccaatatggtgaaggctatgtgcgtttgtcgtatgcagccagcatggaggttatcaaggaagctatgaaacgcttgaaggagtatatggaagaacatgctggagtcaattgagacccggggaattgtactgtataatcgggagtttcgtgaggatgataaactggttaaaatcttcacggagaagtcaggtaagcggatgttttttgtgaaacacgcaggaaaatcacggttgaatcccatgttgcaaccattggtaacggcagatatgttgctgaaaatcaatgatgaggggttaagttatattgatgattttcaagatgtgcaggtttataagaaaatcaatgcagatctttttgccctttcttatgcgacctatgttctagtgcttgcggatgcaagtattcatgataatcaggtggatccggccttgtttgcttttttggagaagaccttgttattgatggaagagggactggattatgaggttttgaccaatatttttgagattcagattctatcacggtttggagttatcttgaatctgcatgaatgctgtttctgccatcgggttggtcttccttttgattattcttttcggtatagtggggtactttgtccggatcattatgatcgggatgagagacgtgcccactggcatccaaatgttctctatttattggatcaatttcaagtagtacgattcagtgagttagagacgatttccctacaagcggagatgaaaacagctctacgtcaggcaatcgatcagttgtatgaggagtatgtagggatccatttaaaagctaaaaagtttatcgattctttgagtgattggggagcgattatgaaagattcatctggaggtgaaatatgaaaaaaattgcagtagatgcaatggggggcgatcatgcacctcaagccttggtagaaggcgtgaatcaagccattcgtgattttgatgatattgagattgtcttgtatggcgatgaaacaaaaattaaagactatttaaccgcaacagaacgtgtctcgattgtgcatacagaagaaaaaatcgattcagatgatgagccagcgcgggctattcgtcggaagaaacaggcttctatggtcttagctgccaaggatgtgaaggctggtgatgtcgatgccatgctatctgcgggaaatacaggtgccttgttggcagcaggtttctttatcgttggacggatcaaaggggtggaacgtccaggtttgatgtccacacttccgacggttgatggtcgcgggtatgatatgctagacttaggtgccaatgcggaaaatacaccagagcacttgcatcagtatgctctgatggggtcttactacgcggaaaatgttcgtgggattcaaaaaccacgtgtgggtctattgaataatgggacagaagctagtaagggagatcctttgcgcaaggaaacttaccaattgttatctgaggatgagtcgattcattttgttggaaacgtggaagcgcgtgacttgatggatggcgttgctgatgtcgttgtggcggatggtttcgcgggaaacgctgttttgaaaacgatggaaggaacggcttttgggatcttgaagcaattgaaacaagcgattgccactggaaactggaaggcgaaattgggagcttttctgctcaaggaccgtttgaaatcattgaaacaaaccttagatttctcagatgttggaggggctgtcttgtttggtcttcaagcacctgttgttaaaacgcatggttcgagtgatgccaaagcagtctatagtaccattcgtcaagttcgaaccatgttagagacagatgttgttggaaaatcagtgaaggaattatcgaaaaaggagtaatatatgagtaaacagaatgaaattttagctacgattgaaacatttcttaaagatcgcaatggggaaaattttcaagtatccttggaatcagatttacgcaaggatttacaggcggactctgttgagttgatggaatttattatcaatcttgaggatgaatatcaaatggagattccagataaggccattgatgaatttaacacagtgggagacgttgtcgactatatcgaaaaacgaactgctgtccattaattgaaaaaggatcgttcagagattattctgaatggtctttttttctgttcttttcattcggattctgcttatattgtacggaattttattgaaaatacactttgtatgtgatagaatgaaggtgataaaatacgaaaggcgaacaaagtcatgactaatcaactgatttatactggaaaagctaaggatatctatactactgaggacgaacatgtgattaagtcggtctataaggaccaagccactatgctaaatggggctcgtaaggagactattaagggaaaaggtgtgctaaataatcagatttcgtctcttatttttgaaaaattgaatgctgcgggtgttgcgacgcactttatcgaacgtatctctgataccgaacaattgaataagaaggttaaaattattcctttggaggtggttcttcgtaacgtgacggcaggttctttctcaaaacggtttggcgttgaagaaggtttggacttgaaaactccaatcgttgaattttactataaaaacgatgatttggatgacccatttatcaatgatgagcatgtgaagtttttgaatattgcaaatgatgagcaaattgcttatatcaaggaagaaacacgtcgcatcaatgaattgctgaaagattggtttgcacaaattggtcttcgtttgatcgacttcaaattggaatttggttttgataaggatggcaagatcatcttggcagatgaattctctccagataactgccgcctttgggacgctgaagggcaccatatggacaaggatgttttccgtagggacttgggcagcttgacagatgtttatgaagttgtattggaaaaattgcaaggcttgaagtaatctttttgaaacggaaaaccttcgtcttcgataacatgtttgaatagaaataaaggaaataaaatggataaacgtattttcgttgagaaaaaagctgattttcgtgtgaaatcggactctttagtaaaagaattgcagcataatcttcagttgaaaacgttgaaggatcttcggattgttcaggtttacgatgtttttggtttggcagaggacttgtttgcgcgtgcggaaaaacacatcttctctgagcaagtgaccgatactgttttggatgaagctgcggttcaggctgatcttgagaaatatgctttctttgcgatcgaaagcttgcctggtcaatttgaccaacgtgcggcatcttcacaagaagctttgcttttgcttggtagttcaaatgatgtaacggtgaacacagcacaactttacttggttaacaaggatattgatgcgaatgagttggaagctgttaaaaactatctcttgaacccagtggactctcgtttcaaagatatcactgttggcattgcgaaacaggatttctctgagtctgacaagaccattccaagcttggatttctttgaaacatatacggcagaagattttgcacagtataaggctgagcaaggattggccatggaagtggatgaccttctcttcattcaagattacttcaaatccattggacgggtgccaactgagactgagttgaaggttttggatacttactggtctgaccactgccgtcatacaactttcgagactgagttgaaaaacatcgacttctcagcttctaaatttgaaaaacaattacaagcgacttatgacaagtatattgccatgcgtgatgagttgggacgtacagaaaaacctcaaactttgatggatatggcgactatttttggccgttatgagcgtgcaaatggtcgtttggatgacatggaagtgtctgatgaaatcaatgcctgctctgttgaaattgaagtggatgtcaatggtgtcaaagaaccatggcttctcatgttcaagaacgaaacgcacaaccacccaacggagatcgaaccatttggtggagcggctacttgtatcggtggtgccattcgtgacccattgtcagggcgttcttacgtttaccaagccatgcgtatctcaggtgctggtgatattacagctccaatttcagaaactcgcgctggtaaattgccacaacaagtgatttctaaaacagcggctcacggttattcttcatatggtaaccaaattggtcttgcaacaacttatgttcgtgaatacttccacccaggtttcgttgctaagcgtatggagctaggtgcagttgtcggtgcggctcctaaggaaaatgttgtccgtgagaaacctgaagcaggtgatgtcgtgattcttctcggtgggaagactggacgtgacggtgtcggtggtgcgacaggttcttctaaagttcaaacggttgaatctgttgaaacagctggtgctgaggttcaaaaagggaatgccatcgaagaacggaagattcaacgtcttttccgtaatggggatgtgacacgtctgatcaagaaatcaaatgactttggtgctggtggtgtctgtgtggcgatcggtgaattggcagatggtcttgaaattgatctagacaaagtgccattgaaataccaaggtttgaatggtacagaaattgccatctctgaatctcaagaacggatggctgtcgtggtccgtccagaagatgtagatgccttcgttgctgaatgtaacaaagaaaatattgatgctgttgtcgttgcaacagtaactgaaaaaccaaatcttgtcatgcactggaatggtgaaaccatcgttgatttggaacgtcgtttccttgatacaaacggtgtacgtgttgtcgtggatgctaaggtggttgacaaggatgtcaaacttccagaagaacgtcaaacatctgctgaaacccttgaagcggatactcttgaagtcttagctgacctgaaccatgcaagtcaaaaggggttgcaaaccatctttgatagctcagttggtcgttcaacagtcaatcacccactcggtggtcgctaccaaattacaccaacggaagcttctgtacagaaattgccagtccaacatggcgtgacaacaactgcatctgtcatggcgcaagggttcaacccatatatcgcagaatggtctccatatcatggtgctgcctatgcagtcatcgaagcaacagctcgtttggttgctgctggtgcaaactggtctaaggctcgtttctcttaccaagaatacttcgagcgtatggataaacaagcagagcgttttggtcaaccagtatcagctctccttggaacaattgaagctcagattcaacttggtttgccatctatcggtgggaaggactctatgtctggtacctttgaagaattgacagtaccaccaaccttggttgcttttggtgttacaactgcagatagccgtaaggttctttctccagaatttaaagccgctggtgaaaatatttactatattccaggtcaagctttggcacaagaaattgactttgaactcatcaagtcgaactttgctcaatttgaagccatccaagctgaccacaaagtgacagctgcatcagctgtcaaatatggtggtgtggttgaagctcttgcacttgcaacattcggtaaccatattggtgcaaacgtcgaattagcggaccttgacactagcttgacagcccaattgggtggattcgtcttcacatcgcctgaagaaattgcagatattgccaagattggacaaacagcagctgactttacacttactgtcaatggtgtaacgcttgatggacacaaacttgacagtgccttccaaggtaaattggaagaggtttacccaacggaatttgcacaagcaactgagttggaagaagtacctgctgtagcatcagatgttgtgatcaaagcaaaagaaacagttgatacaccagtagtttacatcccagtattcccaggtactaactctgagtacgactccgctaaggccttcgaaaaagaaggtgcgaaagttaacctggtaccatttgtcacactgaatgaagaagctattgtcaattctgttgacaccatggttgacaatatcgaaaaagctaatattatcttctttgcaggtggcttctcagcagcggatgaaccagatggatcagctaaattcatcgtaaacatcttgctcaatgaaaaagtacgtgcagctatcgatggcttcatcgaaggtggtggtttgattattggtatctgtaacggattccaagcccttgtcaaatcaggtcttcttccatacggtaactttgaagatgcaagcagcaccagtccaaccctcttctacaatgatgccaaccaacacgtggctaagatggtggaaacacggattgccaacacgaactcaccatggcttgccggcgtgaaagttggtgacatccatgctatcccagtatcacacggtgaaggtaaatttgtcgtgacagctgaggaatttgcagagcttcgtgacaatggtcaaatctttacccaatatgttgacttcgaaggtaaaccaagcatggattcaaaatacaatccaaatggttctgtcaatgcgatcgaaggtattaccagcaagaacggtcaaatcatcgggaagatgggacactcagaacgtttcgaagacggactcttccaaaatattccaggcaataaagatcaacatctctttgcatcagcggttcaatactttactggaaaataaaaggtatacaaaatgacatacgaagttaaatctcttaatgaagaatgtggtatttttgggatctggggacacccagatgctgcaaaactgacttatttcggattacacagtcttcaacaccgtggtcaagaaggagcggggatcctttcgaatgatgcgggtcaattaaaacggtatcgtgatacgggtcttctctcagaagtgtttcggaatcctgctaacttggataagttaacaggaaggggagcgattggccatgttcgctatgcaacagctggggaagcttcagtggataatatccagcccttcctctttcgttttcatgatacccagtttggactggcccacaacgggaatttgaccaatgccaagtccctcaaacgggagttggaaaataacggggcgatctttagctcaacttctgattcagaaatcttggcccacttgattcgtcggagccacaacccatctttcatgggtaaggtgaaagaagccttgaatacggtgaaaggtggatttgcttaccttctcatgctggaagataagctgattgcagccttggatccaaatggtttccgtcctctttcgattgggaaaatggccaatggcgcaatcgtagtttcctctgaaacctgtgcttttgaagtggttggagcagagtggattcgggatgtaaatccgggtgaagtcgtgatcatcgatgataacggcatcacttacgataactatacaacggacacccaattggctgtttgttcgatggagtatatctactttgcccgtccggactccaatattcaaggggtcaatatccatacagctcgtaaacgtatgggggctcaattagcacgtgaatttaaacatgaagcagatattgtggtcggtgtaccgaactcttcacttagtgcagccatgggatttgcggaagaatcaggcttaccaaatgaaatgggcttgattaaaaaccaatacacccaacggacctttattcaaccaacacaagaactacgggagcaaggggttcggatgaagctctctgccgtatccggtgtcgtgaaaggcaaacgggttgtcatgattgatgattctatcgtacgtgggacaacatcacgtcggattgtgaagttattgaaagaagcaggagctacagaagtccatgtggcaatcgcaagtccagctctggcttatccatgtttctacgggatcgatattcaaacacgtaaggaattgattgctgccaatcatacagtagaggaaacacgcgatatcattggtgcagatagcttgacgtatttgtcaatcgatggcttgattgattctattggaattgatacagatgccccaaatggcggtctttgtgtggcttactttgatggaaaatatccaacacctttgtatgactacgaagaacgctatgtggaaagtttgaaagaacatacttctttctattaagagcagtgtaaaagaaaaggaatgaaacaaatgacaaataaaaatgcttacgctccacgtctcactactgactaaaagctaaagcatttgtcagtagacgctttgccctatgggaccaaagctagagacctgactagtatttttagataaaaaattgtttatctaagaatacgtcgcactctttctcaaaaaaagaaaaggattaaaaaatgacaaataagaatgcatacgctcaatctggcgtagacgttgaagcaggttatgaagttgttgaacgaatcaaaaaacacgtggctcgtacagagcgtgcaggtgtcatgggagctcttggtggtttcggtggcatgtttgacctttcaaaaacaggtgtcaaagaacctgtcttgatttcagggacagacggtgtcggtaccaaactcatgctggctatcaagtacgataaacacgatacgatcggtcaagattgtgttgctatgtgtgttaacgatatcatcgctgcaggtgctgagcccctttacttcctcgactatatttcaactggtaaaaatgaacctgctaaattagagcaagtcgttgctggtgttgcagaagcttgcgtgcaggctggtgcagcccttatcggtggggaaacggctgaaatgcctggtatgtatggtgaagatgactatgatttggccgggtttgctgtcggtgttgcagaaaaatctcaaatcattgacggttcaaaagtagctgaaggggatgtgattttgggacttgcttcaagcggtatccactcaaatggttactcacttgttcgtcgtgtctttgcggactatacaggtgaagaagttctccctgaattggaagggaagaaacttaaagacgttcttttggaaccaactcgtatctacgtcaaagcagctttgccactcatcaaagaagaattggtcaacggaattgcccacatcacaggtggtggtttcatcgaaaatgtaccacgtatgttctcagatgacttggctgctgaaattgacgaaagcaaagtcccagttcttccaattttcaaagctcttgaaaaatatggccaaattaaacatgaagaaatgtttgaaatcttcaacatgggtattggtctcatgcttgcggtgaagccagaacatgtggaacgtgtcaaagaacttcttgacgaacctgtttatgaaatcggtcgcatcgtgaagaagacagatgcaagtgtggtgattaaataatggctaaaaagattgctgtttttgcctctggcaacggctcaaactttcaggtgattgcggaacaattcccagtagaatttgtcttttcagatcaccgtgatgcctatgtcttagaacgtgctaaaaatctaggtgtggctagctatgcctttgaactcaaggaatttgacaataaagcagcttatgaagaagctatcgtcaaactcttagatgaacaccagattgatttggtttgcttggcaggttatatgaaaattgttggtccaaccttgctagcagcttatgaaggccgtatcatcaatattcacccggcttatctccctgaatttccaggtgctcatggtattgaggatgcttggaatgcgggtgttgctgagagcggcgtgaccattcactgggtggattcgggcgttgatactggcaaggtcatcaagcaagtccgtgtaccgcgccttgaaggggatacccttgatactttcgaaacgcgtatccacgaaacagagtacaagctctatccagaagtcttggatgttttgggagtggagagaaaataagaagaaaaccaagttttgattgtgtaatcttggtaggagaaaaatgattaatctgaagttagtagatgagagcagctttcaggcagtgctggatttgaaaatatctgatgctgatgagcgagcacgttttgtagctcccaatgtgcgttctttagctgacgcatggctctaccgagagaatggggatgtgtttcccatggcaatctattggaatgagttagtagttggttttctactgttggaaatagataaggatgaggcagaatactttatctggcggataatgattggccagcagtaccaaggaaaaggttatggacgaaaagccttggaagttctaatcaaagaggctcagatggatagggcttgcaatcatattatcgcagattatgtggttggaaatgaaaaaatgaagtacctgctgactagtttaggttttcaggaaacaggatttatagaagaaaataacgaagtcgctatgcggttggatctaaagaaagaggaatagaatgactaaacgcgcactaattagtgtttcagacaaagcgggcatcgttgaatttgcccaagaacttaaaaaacttggttgggacattatctcaacaggtgggactaaagttgcccttgacaatgctggggtagacaccattgctatcgatgatgtgactggtttcccagaaatgatggatggtcgtgtgaagaccctccacccaaatatccacggtggtctcctcgctcgtcgtgacctcgatagccacctagaggctgctaaggacaacaagattgagttgatcgaccttgtggtggtcaacctttatccattcaaggaaacgattctcaaaccagacgtaacttacgctgacgcagttgaaaatatcgatatcggtggtccatcaatgcttcgttctgcagcgaagaaccatgctagcgtcacagttgtggtagaccctgctgactatgctgttgttcttgacgaattggcagccaatggcgaaacaagttacgaaactcgccaacgtttggcagcgaaagtcttccgccatacggctgcctatgatgctttgatcgcagaatatttcactgctcaagtgggtgaagaaaaacctgaaaaactcactttgacttatgaccttaagcaaccaatgcgttacggtgaaaaccctcaacaagacgcagacttctaccaaaaggccttgccaacggattactccattgcttccgctaaacagctgaacgggaaagaattatccttcaacaatatccgtgacgctgatgccgctatccggatcatccgtgatttcaaagaccgtccaactgttgtggccctcaaacacatgaacccatgtgggatcggtcaagctgacgacatcgaaactgcttgggactacgcttatgagtctgacccagtatccatcttcggtgggatcgtggttctcaaccgtgagatagatgctgcgacagctaaaaagatgcacggtgtattccttgaaatcatcattgcaccaagctacacagacgaagcgcttgaaatcttgactaccaagaagaaaaacttgcggattcttgagctaccatttgacgctcaagatgctagtgaagtggaagcagaatacactggtgttgttggtggtctcctcgttcaaaaccaagatgtggtgaaagaaagtccagctgactggcaagtggttaccaaacgccaaccaactgaaacagaagcgacagcccttgagtttgcttggaaggctatcaagtacgtcaaatcaaatgggatcatcgtgaccaatgaccacatgacacttggggttggcccaggtcaaaccaaccgtgtggcttcagtccgtattgccattgaccaagctaaagaccgtcttgatggtgctgttcttgcttcagatgccttcttcccatttgcggataatgtagaagaaatcgccaaagcgggtatcaaagccatcatccaaccaggtggatcagtacgtgaccaagagtcaattgaagcggctgataaatatggcttgaccatgatctttacaggcgtgagacattttagacattaatcaaataaggctgggcaaaaaatgtccagcctttgatttttgataggaataactgcaagacgcagtggttgattggcatctttgttcgctttttaagcttcaaagatggcctaatcaactgtgcgggggtgggaagacgaactccttttaaatagtctgagttctttcccactccctttctgctggttaagaagaccttaatcggggtagatataggtgacggttccccagatggggttggttggatcgaaccaaccacggaagttgtcgatatagcgatggccgttgtagttagcctcttggatctgaattttttggtcatgttcgacatccgtaaccaaggcgacgtgcccatatcccccatcatcccaacagacgatggcaccgacctctggagtgtctcctgtccggaatccagcagcgcgtgcactagctgcccacatgccgccatttccccaccagttgtgggcccaaggggctaattctttggctccccaggtgcactcaccaatggggtaggtgtttcccggatgtgtcgcgagtggagtgagctttggctttgccctttccacttgaaagctagtggggaatagaccttttagttgccccttctttttctggtagacgtggagatgaaatagcccacttcccttgtgtttttgagcctgaaagcgcagttggaaatgtccaggtgcgatcttctttgcgggataccagattaaatcatcctgcccattttcttcagaccagatggggaagacaatttcgtcaacgtcttcgaacaactttaggtctacctcatattctcgtgaggagatgggtgtgatcgtaatcttgggttgggaggaagccaggtctttttgctggacgctggtcgtgagagggtaaaggccggttagctgttcatttgcctccactccatagacatggacatgataaagtccggcttgatcagaatggttggtcaatggcacttgtaggtcaaatcccttgtcactgcgttccacaggataccaaatcaggtcatcttggccattttggtcagaccagacgggaacttggatcttttgatacttatccgggacgattccaagatgaatcattagctgccctttttcggcatagatagcattggtcgcttgatctgcatgggcaatagaggcgtgcatgctccatgtcgcacaagtcagcacgacaaattttttgattgtttgcataatactccttttcgtcaattagtaggtctcacctatactattcggaaaaaaatgagaaataggagaaaatagcaaaaaatgtttggattctactgaaaataggagacttttgctgaaatcattagaataaaacgaacgattatgatataatctaataaaataattcgcaaaagaggttcgagatgaaacttttggttgttggatctggtggtcgtgagcatgcgattgccaagaaattgttggagtctaaagacgttgagcaagttttcgtggctcctggtaatgacgggatacgattagatggtctggatttgatcaatatcggaatttccgaacattctaggctgattgacttcgcaaaagcgaatgatgttgcttggaccttcattggtccagatgatgcccttgcagctggtatcgtggatgatttcaatgcagctggactcaaagcatttggtccgaccaaggctgcggctgagctggagtggtccaaggattttgctaaggaaatcatggtcaagtacgacgttccgacagcagcatatggaaccttttcagatttcgaggaagccaaggcctacatcgaagaaaaaggcgctccaatcgtcgtcaaggcagacggcttggccctagggaaaggtgtcgtcgttgcggagacggttgagcaagcagttgaggccgctcacgagatgcttttggacaataaattcggtgattcaggtgcgcgtgtggtcatcgaggaattccttgacggagaagagttctctctctttgcctttgtcaacggggacaagttctacatcatgccaacggcacaggaccacaaacgtgcctacgatggggacaagggtcctaacactggtgggatgggtgcctatgcgccagttcctcacttaccacagagcgtggttgacacggcggttgacactattgtcaagccagttcttgaaggcatgattaaagaagggcgtccgtaccttggtgtcctttacgcggggcttatcttgacaactgatggaccaaaagtcatcgagttcaactcacgctttggagaccctgaaacgcaaatcatcttgcctcgtttgacatctgactttgcacaaaatatcactgacattttggatggcaaagagccagccatcacttggacggacaagggtgtgacattgggcgtggttgtagcctcaaacggctacccactcgcttatgagaagggtgtcaagcttccagccaagacagatggtgacatcatcacttactatgctggtgccaaattcgctgaaaacgggcaagacctcctctcaaacggaggacgcgtttatatgctagtcacaacagcagatactgtcaaagacggccaaaacatcatctacaacgaattcaataaacaaaacacagaaggcctcttctatcgtacggatatcggtagcaaggcgataaaagattaacaggtactaactttgtcatggtgagcgaaagcgagccaaactaagataatggtcgcttaatttgcgagcgttagcgagctagtttagtataatcgtcgcagtagtggaactcctagtagcagagctactaggagcggaaaactggagactcaggctccagttttagtaatggaacgctacaggcggtcgcttacgtccgcactacaatagacgattatcgaaaaaggagaaaaaggaaaaattatgactaaaccagtaatttccatcatcatgggctcaaaatctgactgggcaaccatgcaaaaagctgctgaagtcctcgataacttcggcgtcgcttacgaaaagaaagttgtttccgcacaccgtacaccggacctcatgttcaaacatgccgaagaagcacgtagccgtggcatcaaggtcatcatcgcaggtgcgggtggcgcagctcacttgccagggatggtcgcagctaaaacgacccttcctgttatcggggtacccgtcaaatcacgtgcccttagtggtgtggattcgctctattccatcgttcagatgccaggtggagtgcctgtcgcaactatggcgatcggtgaagcgggtgcgactaacgctgccctctttgccctccgtcttctttcggtagaggaccaggctattgcgatagcgttagcagatttcgcagaagaacaaggaaaaatcgcagaggagtctacaaatgagctcaactaaaaccattgggatcatcggtggtggccagctcggtcagatgatggcgatctcagctatctacatgggacacaaggttatcgccttggacccagcagctgattgtccagcctcccgtgtggcagaaatcatcgtggccccttatgacgatgtggatgcccttcgtcagttggcagaccgctgtgatgttctcacttatgagtttgaaaatgtcgatgctgacggtttggatgctgttatcaaagatggacaactcccacaagggacagacctcctccgaatctcccaaaaccgaatctttgagaaggactttctttccaagaaggcacaagtcactgtggccccttacaaggtcgtgacctcaagccaagatttggcagatatcgacctgtctaaaaactatgtcctcaaaaccgcgaccggtggctacgatggtcatggtcagaaggtcattcgttcagaagcagacttggaagaagcatacactttagcggactcagcagactgcgttatagaagagttcgtcaactttgaccttgaaatttctgtcatcgtgtctggtaatggcaaggacgtgacagtcttccctgttcaggaaaatatccaccgcaacaacattctttcaaaaaccattgtgcctgctcgcatttcagaaagtctagctgaaaaagccaaagccatggcagtgcgaatagctgaacaactcaacctttctggaacgctatgtgtggaaatgtttgcgacagcagatgacatcattgtcaacgaaattgcgccacgtccacacaattcagggcattattcaattgaagcttgcgacttctcccagtttgatacccacatcttgggtgttctcggagcgccactcccagcaatcaaccttcattcgccagctgtcatgctcaatgttctcggccaacacgtcgaggctgctgaaacatatgtgacagaaaatccaagcgcccacctccacttatatggtaaactagaagcaaagcataaccgcaagatggggcatgtgactttgtttagtgatgtgccggataaggttgaggaatttgggaaagggattgatttttaagtgaaaatagcgattctaggacttggagtcatcgggaccacttatgcctacgcctttcaaaaagcaggccatcaagtggaacacgtactgagagatagtaagaaaagcactgttccgaaggagttgtcggttgatctactagatggtcgctatcattccaaaggtgaaaacaaacacgacacctatgaggttcgtgtggcagaagctgattcagaatatgattttatttttctgagtgtgcgtcatgggcatgtcaaagaagctgtggagaccttgcgaaaaaataatatcaaaggcacccttgttttcttctgtaatttctgggatactcgaaaagaaatccaagagtgggcaggggattacgactatattctggcctttccgacagcgggtggtcacatgcaggaggaccatttggatggtgtcttgttcgaccatttaatgctagaaggtgatcaaaaagcacagatttctaactatgctgatctgacgactttactgacttctgcagatttgcagtgggaagtacctcatgatatggttgagtggatttggattcacatggcgattaacgcaggtgttacttcgacagctgcgcgttcgggaaatctggaaaatccagaagaattggctttgaacttgatgaatagttcttcagaattatcattggccatcaaggccattcgagaggctttgaaagtcgtagaagcgcgtggtgtgaatttgaagctttacaaagcagaactattgccatacaaaattcccgcttggatagccggcaaggccatgaaagtcatgtttgcgaaaaatgagctgacccgaaaaatcatgaccttacacaatgacaaacaggacatcttctattgttgtcaaagtgtttatcagactggtcaggagttgggtgtgaagatgcctattctggaagcaaatatgaagggcatttcgatttaggaggtttttatgattcaactcattgtcaacgcatttgttgaaaaagaaaagacgggagcagtcgtcgaagtcttgtatgctagtagcgatcacgaaaaagtgaaagctaagtatgaagagctgactgctcaatatcctgaaaactatttagccatctatgatctgcctctggatacggatttgaatacattgggtcattatccatctgtgtggattgggaaagaagaatttgaataaagtgattgccgcttgctaactgatgtgaaacatcaaaagaaaggaaaataaaaacatgatcgaacgttactctcgcccagaaatggcgaatatttggactgaagaaaataaataccgtgcttggcttgaggtggaaatcttggcagacgaagcctgggctgaattgggagaaattcctaaggaagatgtggctttgattcgtgaaaaagcggactttgacatcgaccgtattttggaaatcgagcagcaaactcgtcacgatgtggttgccttcacacgtgcggtttctgagactcttggtgaagaacgcaagtgggttcactatggtttgacttctactgacgtggtagatacggcctatggttacctctacaaacaagctaacgacatcatccgcaaggaccttgaaaacttcctcaacatcatcgctgataaagcgaaagaacacaagttcactatcatgatgggtcgtactcatggtgtgcacgctgagccgacaacttttggtcttaaattggcgacttggtacagcgaaatgaaacggaacatcgagcgtttcgagcatgcggctgctggcgtggaagctggtaagatttctggtgcggttggtaactttgccaacatcccaccattcgttgaaaaatacgtctgcgataaattgggtatccgtgctcaagaaatctctacacaggtccttcctcgtgaccttcacgctgagtactttgcagttcttgctagcatcgctacttctatcgagcgtatggcaactgaaattcgtggtcttcaaaaatcagagcaacgtgaagtggaagagttctttgctaaaggtcaaaaagggtcttcagcaatgcctcacaaacgcaacccaatcggttctgaaaacatgacaggtcttgcacgtgtgatccgtggtcacatggtcacagcttatgaaaacgtagccctttggcacgaacgtgatatctctcactcatcagctgagcgtatcatcgcaccagatacaaccatcttgattgactacatgctcaatcgtttcggaaacatcgttaagaacttgacagtcttccctgaaaacatgatccgcaacatgaactctacatttggtttgatcttcagtcaacgtgcgatgttgactttgattgaaaaagggatgacacgtgagcaagcttacgaccttgttcaaccgaagactgcccaatcatgggataaccaagtagacttcaaaccacttcttgaagcagatccagaagtaacttcacgtctcactcaagaagaaatcgacgaaatcttcaacccaacttactacaccaaacgggtggatgaaatcttcgaacgcatcggtttgggtgactaatcgcaacgaaaaagggaatttgaaaaatagacgaaaagaagcagaggaatctgcttcttttttaaactttttatagctaaactatcactaattatatatatttttaaagaggtctttagaaatcgttttcaacatgttatactgaacctataaaaaagaccgaggtgtctcagtctttttggttcttagtgatcgcgactacaggagatgaacttgatcttgtagtagtcaccgcgtttataggtttccgtgtattcaaggatttggccagtcgcttctagcttggtcgtcttcacttgtttgaccgttgggaaattttcgtcgatctttaatactttggccaccttgctaggtgtagggaagacgatttcgttgacttcttcgaagtgttcatcattcatatgaatgtggtagtcttctttgaagcgatcatagatagagctatagtattccaaatttggatagtttggattgatgtattgttcaggaatataggtttggtggaagatataggtatcatcctctatttgacgagttcgttcgatcttatagtagaattgtgttggattaaggcctagtttgtctaggatgttcaaggtatttccgcgtttaatagagagaactttgactttggccttttggattgggaaggtttcaacatctgaaaactcaaccagtttgtgttttcgagcacgagaaacaaaggtcccttttccttgctggcggacaatgtaaccatcagcagcgaggtcattcaaagcacggacaacggtgatagagctgacatcataaattttaatgagttcagcttccgtataaaatttatctccattttcaaattttcctgagataatttgctgcttcaattcatctttgatgtgttggtactttggaattgccatagtgctacctctctttagatttctcttatgtaaccttattttaacatattttttacaaaagtgttgacatttttaaaataatttattatattaataaatgtaagtgtttacatacaagaaagggaggcgtttatggatgtttttgaaattcgcgatgatttctatttaaaaggtcaacctttcaagattttgtctggagcgattcattattttcgaattgattctgccgactggtatcattccttgtttaatctaaaggccttggggttcaacacggttgagacttatgtgccatggaacgtgcatgaaccccacaaggggcagtttgattttagtggtcgattggatctagaacgtttcatccaaacagctcagtccctaggactttatatgattgtaaggccatcgccctttatttgtgcagagtgggattttggtggattgccagcctggctcttggaagaagatatgcgcatccgctcatcggacccagcctttatcgaagcggttgatcgttattatgatcgcttgcttgggttgttgacgcgctaccaagtggatcagggtggcccaattctgatgatgcaggttgaaaatgaatatggctcttatggagaggacaaagtttatctgcgtgccattcgggatttgatgaagaaaaaaggtgtgacctgtcccctatttacatcagatggtccatggcgagcgacgctaagagcaggaaccttgatcgaagatgacctctttgtgacagggaacttcggctccaaagcagcctacaattttggccagatgcaagaattctttgatgaatacggcaagaaatggcccttgatgtgtatggaattctgggatggctggtttacccgctggaaggaacccgtgattcaaagggagccagaggagttggcagaagctgtacatgaggtcttggagcttggctccatcaatctctatatgtttcatggcggaaccaatttcggctttatgaatggttgctcagctcggggaacgctcgatttgccacaggtgacgtcctatgactatggggctttgctcaatgagcagggcaatccgacagagaagtattatgccgttcaaaaaatgatggcgacttattatccagaatacccacagcaagagccactcatcaaagagtgtttgccagagcaaaccttgcaattggcagccaagaccagtctttttgggaatctggacaatttggctcaggttgagaccagcctttatccggaaaagatggaagagttggggcaaaccacgggttatctactatatgagacagaccttgagttggatgcggaagaagaaagactgcgcatcattgatggtcgggatcgggtacagatttacctggatgatcgccatgtagcaacacaataccaaacagagatcggtgaagatctttttatcaaaggaaaaaagaaagcggttacgaatttaaaaatcttgcttgagaatatgggacgtgtcaactacgggcacaagctcttagctgatagccagcacaagggcattcgcacaggtgtctgtgtggatttgcatttccaccttcattggaagcagtatccactggatttacaagatctcagtcagctcgatttttcaaaggaatggcaggcaggtgctccagccttttaccgatatgattttcagctggaccaaacccttgacacttatctagatatgacaggatttggaaagggggtcgtctttgtcaacggccacaaccttggccgcttctgggaggtcggaccgaccacttcactttatgtgcctcatggcttcctcaaagaaggagccaatagcctgatcgtctttgagacagaagggcggtaccaagagacacttcaacttgttcaacaacctacattcaaagaagtaaagggggaaaacttatgactattgtaggatgccgtatcgatggacgtttgatccacgggcaggtagccaatctttggactaccaaactaaatgtttcacgtatcatggtgatcgatgatgaagtcgctcaaaatgatatcgaaaaaagtggcttgaaactagcgacaccacctggtgttaagcttagtatcttgccagtcgcaaaggctgcggaaaatatcttggctggaaaatatgatagccaaagactctttatcgtagctcgcaaaccagatcgtttccttcgtttgatcgaagcaggcgttcagcttgaaacgctgaatgtcggcaatatgtctcaatccgatgagacacgcgcgattacccgctcgatcaatgtggtggacgcggacgtggaagacttcaacaagatccacgaaaaaggtgtgaaaattacgtctcagatggtgccaaacgacactgcagaagactttatgaagttattaaagtaaaagaaaatttttaggaggaaattgtcatgatacaatggtggcaaattttactacttactttgtactcagcttatcaaatctgtgatgagttgacgattgtttcatcagcaggctcaccagtctttgctggtttcattacaggacttgttatgggggatttaggaacaggtctctttatcggagcttctcttcaattgacagtactcggtgtaggtactttcggtggagcttctcgtattgacgcaacatctggtgccgttcttgcaactgccttctcagtagcgcaaggcattaaaccagaaattgcgatttcaactattgccgttcccgtagctgctctcttgacttatgcagatatccttggtcgtatgagtactactgcctttgcacaccgtattgatgcggcaatcgaacgctttgattataaaggaattgaacgcaactaccttcttggtgcggttccttgggctctctctcgtgctcttccagtcttcttggctcttgcctttggtggtgcttttgtccaatctgttgttgactttgttgcaaaatatcaatggtttgcaaacggcttgacacttgcaggtcgcatgctccctggtcttggttttgcaatcttgcttcactacttgcctgtgaaacgtcaccttcactatcttgcccttggttttggcttgacagcgatgttgacagtgctttacagcaatgttcaaagtgttggtgctgcaatttcttctatgcttggaacagatgcttttgcaaaacttccaaaagaacaaatggttgctttcacaaacaacttcaaatctgtatctatgatcggggttgccatcatcggtatcttccttgcagtgcaacactttaaaaacagccaacgtacagttgtagctgctccagcaagcaatgtagaaagcggggaaattgaagatgacgaattctaagaactacaaactcactaaagaggattttaaacaaatcaacaaacgtagcctcttcaccttccaattgggttggaactacgaacggatgcaggcttctggttacctttacatgcttcttccacaattgcggaaaatgtatggagatggcacacctgaattgaaagaaatgatgaaattgcatacgcaattcttcaatacttctccattcttccatactattatcactggttttgatttggctttggaagaaaaggatggtgtcaactctaaagatgcggttaacgggatcaagacaggtctcatgggaccatttgcccctcttggagactctatctttggatctttggttccagctattatgggatctattgcagcaaccatcgcatcacaaggtcaaccatgggggatcttcctttggattgctgtagcagttgcttatgacatcttccgttggaaacagttggaatttgcttataaagaaggtaccaacttaatcaacaacatgcaaagtaccttgactgctttgatcgaagcagcttctgtacttggtatcttcatggtcggtgccttgattgcaacgatgatcaatgtggatgtaacctggatgcctcacatcggggacaaagccatcgatatccaagacatgctcaatttgatcttcccacgcttggttccagctattatcacaggtgtgatttactggttgcttggacgtaaaggaatgaactcaactaaagccatcttgttgattatcgttgctgcgattgccttctctgcctttggtcatttctgcttcggcatgcaataatggagtaaggtatggcaaaagagttagtattggtcagccatggtcgcttttgtgaagagctcaaagctagcacagagatgattatgggaccacaagaatccatccatacggttgcactcttaccagaagaaggaccagaagactttactgctaaatttgaagcaacagtccaaggtctagaagactatattgtatttgccgatcttttaggaggaactccttgcaacaccgtaagccgcttgatccttgaaggacgtgcgattgacttatacgcagggatgaatcttccgatggtcatcgaattcatcaatagtagcctaactggtaatgaaggggactaccctgaacgtgcaaaagaaagtattgtcaaggtcaatgacctcttgtcaaaccttgatgatgatgaagatgagtaggttggtatgggagtctgggagcattatctcagactcctttcccatttatcaacgttagattgtagaaaggaataacagtttctatgttagactatacaaaagaagacttgcaggagctaggagcagagatcaccactcgtgagatctaccaacaaccaagggtttggaaagaaacagcccgcttgtaccaagaaagaaaagcggaaataaaagctttcttagaaaaaattgggcaagagcatgactatatcaaggtcatcttgacaggggctgggacctcagcctatgtgggagataccttggttccatatttgcaggaagtgcatgatgaacgccactggaattttcaatccattgcgacgacggatatcgtagcacatcctcaaacctatttgaaaaaagaggttccgatggttttagtatcttttgcccggagtggcaattcgccagaaagtgtcgcaaccgtgcagttggcccaagatctggtcgatgagctctatcagatcaccattacctgtgcggaagaaggaaagctggcccagcaagcccacggagatgagcgcaatctcttgcttctccaacctaaagaaaccaatgatgctggctttgcgatgacctctagcttcacctccatgctcttgacagctctcttggtctttgatccaagtgaggaagagatcaaggaaaaacgagtagaagagctggttgatctgtctgagcaaatcttggagaaggaccgtgaggtcaaggaagtggtcgatctagactttgagcgcgtgatttatctgggagcaggacctttctttggtctagcccatgaagcccagctcaagattttggaattaaccgcaggcaaaatcgcgaccatgtacgagagtcctgtcggcttccgtcacggtccaaaatccctcatcaatgaccaaaccctcgtcttggtctttggctccattgatccttatacccgtcagtatgatctggacttggttcgagaagttgcaggggatcaaattgcccgtcaagttgtcctcttgacggatcaagttgcagggattgagcatgtacgggaagtgttagtagaagcatcagcagacttactagatatctaccgtgccttcccatacattatctacggtcaattgatttctatcttgacctcactcaaggtgcaaaatcgcccagatacgccttcaccgactggtaccgtcaatcgggttgtgcaaggggtgatcattcatccatttcataaagaatagccactaattttctataaaaagtggagtgtttcttcttgtgaaactgatacaatggagaaaagcagtgagaggagaaggattatgaaacagtatcaagaaagcgtgtttgggaaatggcagaatcaagaggttcgggcttatcgcttcgaaaatgacaagggctatcaattgtctgtcatgacctatggggcgacgatcttagaatatgtgacacctgataaagaagaccggtttactaatattattctaggctttgatcgctttgaggactatgtgggcaatagccctaaatatggggctggtattggcccggtagcaggccggattgcaggagctagctttgaactcaatggtcaaacctatcacttggaagccaataacggtgccaactgcaaccacagtggaccgacgggttgggacagcgccttgtttagcgtggagtcggtaacggatcaggaaattactctctacacagagcgtgcagatggtaccggcggtttccctggaaatctcaagatctgggtaacctatggtttgacagaagatggtgaactcgagattgcctatcgggtagaaacggatcaagataccttggtcaacccgacaaaccacagctatttcaacctatctgggaacttcacccaaccgatcaacgaccatgtctttcagatcaatcatcaagggctttaccctatccatcctgacggtgtccctcttcagaccgtggatagagaaagtccggttgtccagcatctctatcaagctatgctcttggaggatctttttaaggactctgatccgcaaatccgccttgtagaaggattagaccatccatttgctctgccagaagggcatgaaaatgctggctttctttaccatcagccatctggacgttttttgaccttcaagtcagaagccccagccttggtagtgtattcagccaatttcgtagacgagactgttcatctgcaaggtcaaccaatggttcagcacaatggcttggctctagaattccaaacagtgccagatgccattcacagtgaccaagctgaaaaggtcatcttgagagcaggtcaagtttttaccagtaagactagctaccatgccatcgctaagaaataaggaggaaaggggtgactcaaacaaggatgtgaaatccttgcttgggacatcctctttttctcgaaaaaaatttttagaaaaactataaggaaagtttaagcttcctatcgtatactaataccatcatcaaagacctcctaactttgaatgataaaactcctaaaactttttcataataatctccctataagagccaccaaaaccggtggctttttttctgggagtgagacagaacaattttttaaaattgttcgttgtctcacccccgcacagttgattaggtaatctttggagctataagagcgaacaaagataccaatcaaccactgcgttatgtaattattactaaacctatttcatctaaccaagcctgatagggacgtagacgagcttaggtacattgacgcagttcgaacgcaagtgagaactatctttaaaaaacacattctatttgtggtaccgaaggcatcattttttgctataatagactgtatgagtagaattttagacaatgaaatcatgggcgatgaagaggctgttgaacggacgttgcgcccgcaatatttacatgaatatattggtcaagataaggtcaaggaccagctgaaaatctttattgaggcggctaagcttcgggatgaagcactggatcatgtccttctttttggccctccggggcttgggaaaaccaccatggcttttgtcattgccaatgaactgggtgtcaatcttaagcagacttctggtcctgtcattgaaaaggccggtgacctggtagctatcctcaatgatctagagcctggcgatgtcctctttatcgatgagatccatcgtctgcctatgtcagtcgaagaagtgctttacagcgccatggaagatttttacatcgacatcatgattggcgctggtgagagcagccggagtgtccatctggaccttcctcccttcactctgattggggcaacgactcgagctggtatgctgtccaatcccttgcgcgctcgctttgggattaccgggcacatggaatactatgagcaagatgatttgacagagattgtcgagcggaccgccgagatctttgagatggaaattacccacgaggctgccgaagagctttctcttcgtagtcgtggaactcctcggattgccaaccgtttgctcaaacgggtgcgcgattttgctcagatcatgggcgatggcttgattgacgataccattacagacaaggccctctctatgctagatgtggaccatgaaggactggactatatcgatcaaaagatcctgcgtaccatgattgaagtgtacggcggtggcccggtcgggcttgggactctatcggtcaatattgccgaagagcgagagaccgtagaagatatgtatgagccttacttgattcagaaaggctttatcatgcggacccggacagggcgcgtggcgacccgtaaggcttatgaacacctgggttatccctacaatggagattagaagaagatgctgacggaagaagcgatagtagaacagatccaagcggatcaagagatgatgaaagtcttgactattattcgagatctagacttggcagatgcctggttagcggcgggtgcggtccgcaatttcatctggaaccagctctctggaagaccagggtttgacgcgacaaccgatatggatctggtcttttatgaccctgagatcagctatgaggagactctgcagatcgagcaggaattaaagaagacctatcctcagtacgcttgggaagtgaaaaatcaagtctatatgcaccagcatagtccggggacagctccttatcgcagtgcctgtgatgcggtttccaaatatcccgagcagtgtacggctcttgcggttcgcttaaagaaagacgatcagctagaattctttctcccttatgggacaagcgatatcgaagacttcattgttcagccgactccgcattttttagccagtccagagcgtttagcggtttatacagagcggatgaaaaagaaaaattggcagagtaaatggcctccattagaggttcgttttccaaaatagagaaacagatcagatttgaaaaaggaatctgatttttctttaaaatgatggagcccctttgtcatctttctgtcacatttttgttataatagtaatagtatgctggttttccttagtggaaagcgaagagctcagctaggttgggcagtccgaacaaggagttaggtggaatcatgaaaaaaatcgtctttgtctgcttaggaaatatttgtcggagccccatggcggagtttgtcatgaaggacttgacggatcagtatgagattgaaagccgtgccacctctagctgggaacatggcaatcccatccatcggggaacccagagaatctttcaaaaataccaggtcccttatgatccagccaagacttctttacagatcaaagaagaggatttttacaactttgatttgatcctagggatggacgcaaataatgtggcagatttgaagcaaatggctcctgtaggtacagagcacaagattcatctttttgctgctgaaagtgtgccagatccatggtatactggtgattttgaggagacctatcgcagggttctggctggctgtgaagtctggttggatcagctggcaacttcctaagagtttgatatgtgagagaatacgggatatgaaagaattttatgagacctacaaggtctatctgacacgaaaaaatttggaaatagtcgcattgatcgtcatgatcttatctattttgatggtcttcctttccgccattcctggtcagggagccttgacgcttgataagggggctatccgttataacggaaccttagtccgtggtaagatgaatggcaagggaaccgtcactttcaaaaatggggatacctacacaggcaacttcgtcaacggttcttttagtggttatggcaagtttaaggccaaggatggttggacttatgaaggctattttgtcaacgggcagccggagggtaaaggtaccttaaccacagaagccaacgtcgtatacaaaggaacattcaagcaggggatttatcaaaatgcgcattaaatggttttcactagtccgtgtcacaggactcttattggtattgctttaccatttcttccagaaggcctttcctggaggcttcattggggtagatattttcttcaccttctcaggatttttgattacagcgctcttgatcgatgagtttgcgcgtaagcaagagatcgactacctggctttcttgaagcgacgcttttatcggattgtaccgcccctcgtctttatggtcttggtcgtgatgccctttacctttatggtccaacgtgactatgtggctagtattggcactcagattgcggcggtctttggttttgtgaccaatttctttgagatggcaactggtggtagttacgaaagtaacttcattccgcatctcttccttcatacctggagtttggctctagaagtgcattactatgtgctatgggcacttttggcatggtttttggctaagagtgctaagactgttgggaaataccgaggtatgctcttcctggcgtccagcggactctttctctttaccttcttgtctatgttcatccgcgcctttctgacagccaatttctcaaccatctatttctcaagctttactcacatcttccctttctttgcgggatcctgcttagcgacggtgacaggaattgccaatgtcagccctaatttcacacggatggtacagtcttggagcatgaaaaagacactatcggtcttgggtggaagctttgccttcttgtttgtggtcagtcttttcttgccatttgatagcttatggacctatctatttggctttctagcagcgacaatcgcagcttgtgctatgattctgtcggcccgcattctccatgaaaagacgccagacaaaaaagaaccagccatccttaatttcttggcagataccagttatggcgtttaccttttccactggcctttctttatcatcttctctcaacatttgggaaatatgatggcggctatagtgacgactatcctatccttgattttgacagctttatctttctatatcttagagccaaccattgcaggcaaggaacctcgtgtctttggcatgaagatggatctcagttttttgaccaagccgatcttttatcttatgattcctttggccttgctgatgattggaatttcggcctttgcgccaacagttggggcctttgatgagagtctggttgtaagtggcctcaatcaagcagatagcaaaatgcaggttacacggacgcaagtggacaatgcgactgcaacagactataacgtctcaaatggtgtgactatgatcggagattcggtcaacttgagggcacaggattacttgacaaatgcgatccctgggatccagattgatgctgtagtgagccgtcagttagaaaatgggatgaaggttttcgagacggatatctccaataaagttctccttaaaaatgtggtcattgccctaggaactaataccgtcagcaactacaaagagctactggatcagtatgttgaaaaactaccaaaaggtcgtcgtttgattcttgtgacaccatatgacggtcgttatgcgagtgatcagtccagtgaatcggtccaaacccgtctctatgagttggaattggctaagaagtacgactttatcaccattgcggattggtaccaagtggcggtggaaaatccaaacatttgggtcggaactgactcggttcacttcaatatggaaacaaatggtggggagctctatgcccaaacggtcaaagaagccctagataaagcggaaaaaggtccggttaagaagtaggtagacttctttgaaattgcaataaaacaaataaattaaacagaataaaagcaactttttacttgtggaaggttgctttttttagtaaaatatagaaaacgcttacaaaaattaaatgaaaatgtcactttgtgaagaaaaaatttttaaaataatttcttcacaatatagctaaagaaaacctagtgaaaagagtgaatagataaaaacttcacaaacttatagaaaaatctttgtgaaagttgcttggaagtgtttacaaaaatctcaaaatagagtacaattatattgtgaaataattaacaaaacgaaatttcttacactattcttgaaaatttccgaaaacatgaaaaagttctagaaaaggataagggtttcaaacattggaggaaagcatcaaatggctgataaaaaaactctctcacctgaagaaaagaaactcgctgctgaaaaacacgtagacgagttggtgcaaaaagcgctggtggcgcttgaagaaatgcgcaaattgaatcaggaacaagtggactacattgtggcgaaagcatctgtagctgctcttgacgcacacggtgaactcgctcttcatgcatatgaagaaactggtcgtggggtctttgaagacaaagcgaccaagaacttgttcgcttgtgaacacgttgtgaacaacatgcgtcacacgaagacagttggtgtcatttcagaagatgacgtcactggtttaactttgattgctgagccagtcggagttgtctgcgggatcactcctacaacaaaccctacttcaacagcaatctttaaagcattgatttccttgaagacacggaaccctatcgtctttgccttccacccatctgctcaagaatcatcagctcatgcggcacaaatcgtacgcgatgcggcaattgcagctggagcacctgagaactgtgtgcaatggattacccaaccttctatggaagcaaccagtgcccttatgaaccatgaaggagttgctacgatccttgcgaccggtgggaatgccatggtgaaagcggcatactcatgtgggaaaccagctcttggggtaggtgccggaaacgtacctgcttatgttgaaaaatcagctaatatccgccaagcagcacacgatatcgtcatgtctaaatcatttgacaacggaatggtttgtgcgtctgaacaagcggtcatcatcgataaagaaatctacgatgagtttgttgaagaattcaaatcttaccacacttactttgtcaacaaaaaagaaaaagcccttcttgaagagttctgcttcggtgtaaaagcgaacagcaagaactgtgcgggtgcgaaattgaatgcggacatcgttgggaaaccagcagcatggatcgctgaacaagctggcttctcagtcccagaaggaaccaatatccttgcggcagaatgtaaagaagttggtgaaaaagaaccgttgactcgtgaaaaattgtcaccagtcatcgctgtcttgaaatctgaaagccgtgaagacggaattaacaaagctcgccaaatggttgaattcaacggtcttggtcactcagcagccatccatactgctgatgaagaattgaccaaagaatttggtaaagcagtcaaagctattcgtgttatctgcaactctccttcgactttcggtggtatcggggatgtttacaatgccttcttgccatcattgacacttggatgtggttcttacggacgcaactctgttggggacaacgttagtgccatcaacctcttgaatatcaaaaaagtcggacgccggagaaataacatgcaatggatgaaacttccttcaaaaacatactttgaacgtgattcaattgaatacctacaaaaatgtcgtgacgttgaacgtgtcatgatcgttacagaccacgctatggtagaacttggtttccttgatcgtatcatcgaacagcttgaccttcgtcgcaacaaggtggtttaccaaatctttgcagacgtagaaccagatccagatatcacaaccgttgaacgtggtacagagatcatgcgtgccttcaaaccagataccatcgtcgctcttggtggtggatctccaatggatgcggctaaagtaatgtggctcttctatgaacaaccagaagtggacttccgtgaccttgtacaaaaattcatggatatccgtaaacgtgccttcaagttcccattgcttggtaagaagaccaaatttatcgctatcccaactacatctggtacaggatctgaagtaactccatttgccgttatctctgataaagcaaataaccgtaaatacccaatcgctgactactcattgacaccaaccgttgccatcgtagaccctgccttggtattgacagttcctggatttgtagctgctgatactggtatggacgtattgactcacgctactgaagcttacgtatcacaaatggcaagtgactacactgatggtcttgctcttcaagctattaaacttgtctttgaaaacttggaaagctcagtcaagaatgcggacttccattcacgtgaaaagatgcacaatgcgtcaaccatcgcaggtatggccttcgccaatgccttcctcggtatttctcactcaatggcccacaagatcggtgcgcaattccacaccatccacggacggaccaatgcgatcttgcttccatacgttatccgctacaacggtacacgcccagccaagacagctacatggcctaagtacaactactaccgtgcagatgaaaaataccaagatatcgctcgtatgctaggacttccatgttctactccagaagaagccgttgaagcttacgcaaaagctgtatacgaactcggtgaacgctgtggtatcgaaatgaacttcaaagcacaaggaatcgatgaaaaagaatggaagaaacattctcgtgaattggccttccttgcttacgaagatcaatgttcaccagctaacccacgtcttccaatggtagaccatatgcaagaaatcatcgaagatgcttactatggttacaaggaacgtccaggacgtcgtaaataagacgctaacgaactattgatgtttatcagctacccctactctttcgagtgggggatttttgatgggattttcaaattttatgctgactatggaaattgtaaaatcgactttatcttggcgatttagagttggaattctctttctttcatagaaaattagacttttttcaaaaatctgtgctatttttatagcattgcgagctaatttatgttaccctataatgtgtgaatctgcttgtagttgaagggttatgatagcttttcagttataggaaacaaataataaggaacttagaaaggaggccatctcatatggagttagaaggtgaagtgcaaggaagacaagatcaggcacagaaaattattgacatgccccaacgagatcagggaacttccacttcagaaaatcagccatcatctgcttcggtggtctccatgtatgggcaggaaaggcctggtcaaggtagtgggcattcgtacagcatttctagcctccatcagcaactagcgaatgcgtctgggacccagaccattcaattgcgggaggaattggtgctggcagtagcacagaatgcttcagcgcaagccactgtgtttgaggcagaagtcaaggacaagttggaagaggctaaggagatggtttcccataaagtcgctgaggtgtctcaaatggcccacagcatggctcaatttttaacagacgcagaagtggagcaactattaggggagttctccatggatacttgttgggaccaagcagtagaggcggagaacctcgcccaagcaaaggcctactctactcgcttgtcagatttggcgggtcagttggaggctgcatcagctcaattggtggacttggacaagggacaagcgacggcctttgatttttcataagtaggagaaaaagatgttagagatcctgggagaggacagagaacgaattgaggagctccatcgagagattaaaaaggagcaagagcggattgcgatcagaagtttgattgcaacgcagaaagccttgatgatgttggaagggatgagcttgcaggtaaccttgggcggtcaatctgaaaagatgcgctcttttgctacaacgaccctggttagtgatttgaaagatggatttacaggaggagcagcggacgcggtagaaacagcactgaaatcagtgaagaagccgattttattgagtccgattaaaggaggtatgtgatgtaccattcaggaaatagtgaattggaacaactagaagatcgacattaccgcttcaatcaaaagcttagtgagctggagtgggattatgcggatatgcgtatggatgttcgccaacatacagaaaatttagtggactggctgagtgccctacattttcaagccccaagtgcggaggctcaaagtggcttggagcgtttatttgccttgcaagaagagtttgaggcagaactcaagcgctatgaagagcgcttagaagaagagcgtgagcgcgaacagcaagagtactacaagcagcgtcaacaattagaacaaggtgattgaaacattcctctggtagagataagaggaatgtttttgtttgctcaaaaaactttttaaaatatgctcataaattcttgtaagcgcttgcttagtatgttataatattcacaaacaaacgaaaataaaatggttttatcaaaccaacaaagaaaaggagtcgcttatgaaagctgcaacctatgtatctgcaggcaatctgcaactgctggatcaagctcatcacccaccacttcaaactctcagaagttgaaaaagcctatgatgtctttaaacacgcgggtgaaaacaatgcacttaaggtgattatcgaaaatgataccagtgaatgaagtggcaactaatgtttgttcatagtttttttagtagggctgggaggtaacttctagccctttttcagaggattaagagatgagagatataaaaagtgaaattgggaaaaaactaagacgattaagagaagaaaaggggatgacgagagaagtactttgtaatgatgaaagtgaattaacagttcgtcagttagtacgtattgaaaagggagagtctttgcctagcttaaaaaaattagaatatattgcgaatatgctgggtatttcagtgtcgaatattgtagatcgtgataaagcggtgttacctcgtagatatctagagttgaaatttctagttactcattttatgacatatggggatgaagaacggataagactaaaggaatcttattttgatgagatttacgaatcgtattttgaagatttaccagaagaggaacaagtggctattgaagccgttgatgcagcattaaatgttttttcaactgaaaaagctgaatatggagaaaatttgattgaggaatattttgggcaattgatgactaaaaaagaattttctcaaaatgatctattaattatcaaattatttttgttcaaatgtctcgcgagagcaaaagataaaagcgatgccatgattttagttgataaaatgattgctaccaaaaattcatctgataaaacgagcctatatttaataaccagaaatttgatagcgatgacttctattttatatcaagatgaagattatgatcagttgggtccatatatagatgaattggataaattggtacaagaaactcaatattttcaacaaaagccaggtatagatatgatgaaaggaacctatgcattctacgtggaaaaaaacatagaaaaggcaaaagtattttatcaccaagcaatggtttgtgctcattcatttggcgaatttgatcttgaaaataaaataaaaaaagaaaaggaaaaacattttaaaaaatgagaatgtgacatttatgtcatgtccattttatttttaaagtgataccattgttattgaagatgaagtgggaataataattaggtagagaagataattataactattacaggaggatgtttttttcagatttgatggatgaaattatcatgtataaattataattttcacttcatatttcttgtaaataacctattatagtcttataatataagtgcagaaaacgattacataaagagaaaggtgtgatcttatgaaacggttttgttatcatcgtgaattctggatggactttcatttctggatcttggtcttgcttttagcggctgtagctttgacgatgcgggatcctctttcggtagttagcctcgcttatcttgcttttgttgggattttgatccttcttcaggtctttcaaccgcctgtatcgacacgtcagtacccagaaggtagctaccatttcaattggaccttctatcgcgatacccgactgtatatcaatctctttttactagcaggtctcttggcaggcccaatggcttcatcggatatggtctattggatcttgcttggagccgtcgtcggctctatcggttttgtatttgtcgtaaaggaaaaagcaactcaaaagatggcctagatagatgagatggtttcagtattatagagtagaaatacttttttagaataatcaaaaaactaagaaggatgagttttatctcatccttcttagttttttaaatagggagaccatattaaaattttcgagaacgttgaccagagagctttttgttttcccagtagctattaaagacaatttccttttgttctcggcttttattaaggaaatgagcatagatcaaatcgaccacaatgaggagtggtaaaatagcagaaattcgatcgatataggtactactaggaagaggtgcggccggtaacacttctgtgaatccttggtggatggcagccgggttagcggtcacaagaatcgttttagcccctttttctttggcgtccaggagactatctgtaatggagttggtgcctcctgacaatgagaaaccgatgactaaacaagaggaatcgagaatactggtcgtccaggcaaagccatcttgatcagtcagggcttcacaaacgacgcccagtcgcataaagcgcaatttcatttctcgagcgactaaaccggaactaccgatcccgaagaaatagactcggtctacttgatcgattagttcagctacctgatctaattgggaatctttgaccagactttcagtgacgttactgatatggtggtagcgttgcaagacactgagagtgagttcgtcatgcacttgcacttgtttttgattctttgtttcctcattaaaatgatagacaaactcccgatagccggaaaaaccacatttttgagagaaacgcgttaaagctgcctttgagacatggagtaactccgttacacgagaagaggacagggagtgctgtcgtgcttcggatgataaaaaatattgggcaatgtcgcgttccatatctgttaactcagcttcatggctggcgataatggcgcgtaaatcttgatcttgtttcacagcaatcctcctttctcacgagatgaaataacaggatactcctataatatattacacattataacatgggtaaccgctttattcaagtaaaagaaatcaagaaatactgaaactaggaacaggataggagaaaagaagagaacgcttccaatcctggcagtagtggcttgttggttatccacaattttctgaaaatttccggttgggcctgaacaaacgatatgaattgtggtataatttaagataattgtactgttgttggaagaacaatagttgaataaggaggtgtgacgatgtcgaatgcaacactcgagatgatgcaagagatcgagcaagccgctcagggcgtgatcgtaggctatgaagctcaagttgaacaaatccgaacggattcacgcgatcgccttgcaacagtggcacagcattacgatgaggaaaccaagcaattggtcacagaggcagaaaaaaacgcccaggaaagactcgtccgtttaacgaaagatctggaagaaacggttgcgcgcaatgatgccaaggtacaagaggcgatgaccgataaacgagctaggttagttgaagccattgtagaaaaggtggtagcaagctatggccgttagtcagatgcaaaaactgtccctcattttgcccaaagatgacttggacagtctcctactagcgctacagtctgaggcaaaaatccagatttatgacctcagtgaacaggaagaatggcaggctgcctttgaggcaaataccttgtctcaacccttgacagaggacaatcgtcaagccttggtagagctgcaaaaacgtcaagaacaagttgaaaaaatgattcagactctagagctctacatgcctgagaagaaggctctgcaagctctgaaggaagaacccttaagcttgtcttttgatgacttgcaggctcacgggatgattcgagacgaggatctcctattgaccaagttgaaacgccaattgcgcgtgttagacaaggctcgtcagaagattgcggatgcaaagggagagatagagcgcttagaaaaatggcgaccgttagaggtgacgccagctgccctcgctacttttcactatgtgcatggcttgatcgggacgatcccaaatagcgatacagacgctgttcgttcttccttaaaagctcatccagagctggagttagaagaagtctttacgtctgagactgaacacggctatgtcattttgtatcgctcgggagaccgtgtagctgttcaggagcttctagaagaccatggattcaaagaattggactataaagaagagcaggtcccggccgtctacttggatcgcctagaaggggaaatcaaagagcaagaagctgtagttgcagcaaccctagccgagttgcaaaactcccagaaggagttggaccagctcaagtaccagatggattacttgctgagtttgggagctcgggaggaagccaagtcccttcttgccagcacgcaaagcttggtagccctagagggttggattgaaacctcccaagtggcctcattgcgagacttcttgcaagaaggttttggttctcgggtcttactagagacgcgcgatgtgacggaaaaagattgggatgacgttccgatccagttgcgaaataatgccttggtagagccctttgaattagtcacagagatgtacgccctgcctaagtattacgagaaagatccgacaccgatcgtttctctcttctactttgttttctttggcatgatggtcgcagatatcggttatggactgttgctaacggtagcgacaggctttgcccttaaagcctttaagctcaagcctagtacagccaagaaccttcgtttcttcagtctccttggaatttcagttgccctttggggtgtggtctatggctctttctttggatttgagatgccttttgccctgatcagtacgaccagcaacgccatgaccatcctgatcctctcagtggtctttggttttgtcactgtcttagtgggcctcttcctaggagggatgaaaaatattcgcctcaaagactacacggaagcctataatgcgggctttgcttgggtcttgatcctacttggtttaatgcttctagcagtaggcaatatcttgccagggatgagccttctagttccgattggcaagtggctggctattttgaatgccattgggatcttgattgtttccattgtcagtgccaagaagttgtccggcctagcctctggtctctttaacctctacaatgttagtggctatgttggagacttagtcagcttcacccgtttgatggccttgggcttgtctggagcgagtatcggttcggcctttaacctcattgtcaatctctttccaccgcttggacggtttacggtagggcttctgctctttatcgtcctacatgccattaatatgttcctgtccttcttgtcaggatatgtgcatggagcccgtttgatctttgtggagttcttcggtaagttctacgaaggaggaggcaagccatttcgtcctctcaaaccttctgaacgctatattaaaacaaaaaaataagtattatctttaataaataggagtatattcatggaatctttagcatcatatttttcagcccatgggggcgccttctttgcagcatttggtgtggcgatcgccgttgcacttagtggaatgggatctgcccttggggttggtaaaacgggtcaagcagcagcagcgctcttgaaagaacaacctgaaaaatttgcccaagccttgattttgcagttgttgccaggtacacaaggtttgtacggtttcgttatcgggatcttgatctggttgcaaattaagccagatatgccacttgaaacaggggttgcttacttctttacagctcttcccgttgcgatcgttggttatttctcagccaaacaccaaggaaatgttgcaacagcagggatgcaaatcttggccaaacgccctgaagacatgatgaaaggggttatccttgcggccatggttgaaacctacgccatcttggccttcgttgtgtccttcctattgaccctacgcgtcggctaagagctagctttgatggattcgcctttcgaggcgaaaaacacaagacgcatgcaataggagaaaaaacgatatggatgaacaaacccaattaaaggattcgatcttggcacaagcccacgaaaaagggcgtaaactcttagaagagaccaaggaaaccatcctaaaagaagagactgcacaagaagagcgtttgatccaagacaaacttaatcaacgctccgagcagctcaagcggattcaacgtcaattgcaacgtgaaacccaacaaatcgaaaataaaaaacgccaatcaacccttgtcaccaagcaacgagtcttaaaggatctctttgcagatgcttatgaagcgatggtggcttggccccttgaaaaggaaatgcagtttgtagatgcggtcttagatcgctatcagggacaagttgtgaccctgaccttcggggcggtgagcgctgctaaatttgattcagcagctctcgagagattgaagcagacacatcagaatgtgacagttgcagatgcgacgatcccagctcaagcaggctttgtcttgtcggttgggaagattgatgacaactatctctaccgtgatttggtggattccatttgggagcaagaaagctaccagatggcagccagcattttcacagatgaagagaactaggaggttgcaatgagcgaacggacctattctcaagtcaatacaggaatcagcgtacgtgaggctagttttgtcagtcccagtcagttcgagcagttgcttgcaagtcactcaagcgagagccgagagggtttgctacaagggacaccttatgctctggatagcaaggagatcaaggatttagcagcccttgaagcccgcctgatggcagccttgttggcagaataccaatgggcttttgaggtaagccctcagtcagacttggttagcctttttaccttgaaatacacctatcataatctcaaggtttatctaaaacacaaggcgacagagcgcaagttggggcacttattgatccctatcggtccttattctctcgatgtgctcgagcatttggtggcgaccttttctgcggagcattgtccggcctttatggcggaagaagtggctgcaacctggcaagaattccaagactatcaggacttgcgggttctcgaaatcgggatggatttagcttattttaaacacctgagatacttaggggacagtctagatcatccgattctgaagcagttggtggacgtgaccattgacttttacaatgcgattacagttaagcgggccttggatcagcaaaaaccgcatagctttatgcaccaattactttcagatgaagggagcctcagtgcccatcaagtgatcgacctgctagaatccggtcagtggttgacctggttttatcaagtcaatccgctggactacgatctcgccttagagacttatgaagaaaagatgcgcaccggtcaactaaagaccgtagagttggagtatttagagagtttggtgaaattcagtcttctagacgctggccgttttgaagtcgatggaccactccctcttgttcgttatctttacggaaaagagttagaggtgaccaaccttcgtttggtcctctctggtttggacaatggtttcccgctagcagaaatcaaagaaaggatgagaccgatttatggacaaacagacctataagatcgccgttgtgggcaatcgggacgccatccttccttttcgcctgattggctttcaaacctatccggtcacagagccacaagaagcgatcaataccttgcgaaaactcagtcgggaaaacttcgggattatctacctgacagaggatattgctcaggccattccagatacagtagctttttacgaccagcagctgacaccggctctgatccttatcccgacccatagagggactacaggactgggccaacagcggattcgtgataatgtcgaaaaagcagtaggacaggatattttatgagaacaaatgaatttggtcaagcgattggcgatgcactgccggattttacaccggggcttctgccagctattgagcggatcgaaggtcgctataccgtgatcgagcgcctctcaaaagaaaaacatggagcagatctttatcaggtctacgggccggactctccagcagcgatgtggacctttctgttcaaaggccctgcccgcaatgaggaggagtgggaccgcttattagatgatcttatgacagcccaaggtcgcttttactatgcgattgtagacaaagattcaggcaaggctttgggaactttctctctcatgcggatcgatcaagctaatcgggtgatcgaagtcggagcagtgacctactcaccagcgctccaaaaaacacgcatggctacggaagcccagtatctgttagcgcgctacgtgtttgaagatttaggctaccgccgctatgagtggaaatgcgatgccttaaaccaagcatctcgcaaagcagctgagcgcttagggttcacctatgaaggctgtttccgtcaggctgttgtttataaaggtcggacccgtgatacagactggttgtccatcattgaccaagaatggccagaaatcaaacagcggctagaagcttggttggatccaagcaatttcgatgccaatggccaacaaaagaaagctctaagagagatagcacaaaagtaaaacaaagaaacaaaggattcccaggaggaatacatgactcaaggaaaaattatcaaagtttccggtcccttggtggttgcatcagggatgcaggaggccaatatccaagacatttgccgggtcggcgatcttggtttgattggcgaaattattgagatgcggcgggacgaagcctctatccaagtatatgaagaaacgtctggagttggtccaggagaaccagtggtaacaaccggagctcccctttctgttgaattgggaccaggcttgatctctcagatgtttgacgggatccaacgccccttggaacgcttccaagaagttactgccagtgactttttggttcgtggggtgcaagttccaaatctagatcgggacaccaaatgggcctttgaaccaagcctgacagaaggaacagaggtggttgcaggagacatcgtcggtaccgttcaagagaccaatatggtggaacaccgcatcatggtgccttttggagtgagtggacgtgtgactaagatcgcagcaggttcttacacagtggaagagccggtctatgagatcgagcaggcagatggtagcttctttactggaaccttgatgcaaaaatggccggttcgtcgaggccgtccctttgcacaaaaactcattccagtagagcctttggtcaccggtcaacgggtcatcgatacttttttccctgttactaaaggtggagctgcagcagttcctggtcctttcggagctgggaaaacagttgtgcaacaccaggtggccaagtttgccaatgtagacatcgtaatttacgttggttgtggggaacgtggaaatgaaatgacggacgttctgaatgaatttccagaattgatcgatccaacgactggtcaatccatcatgcaacggaccgttctgatcgccaacacttcgaacatgccagtagcggcgcgtgaagcttccatctacacagggattaccatcgccgaatacttccgtgatatgggctattccgttgccatcatggcggactctacttctcgttgggcagaagctcttcgtgaaatgtctggtcgtctagaagaaatgccaggggatgaaggctacccagcctatcttggtagccggatcgccgaatactacgagcgtgcaggtcgggtcaagacacttggaaccactgcgcgtgaaggttcgattaccgccatcggtgccgtctctcctccgggtggagatatttcagagccagtcacgcaaaataccttgcggattgtcaaggtcttctggggactagatgctcaattggcccaacgtcgccacttcccagccatcaactggttgagttcttattcgctttaccaagatgaagtcggtcgctatatcgatctacatgaacaaatcaactggtctgaaaaagtgacccgcgctatgaatttgcttcaaaaggaaagtgaattgcaagaaatcgtccgcttggttggtctagactccttgtctgaaaaagaccgcttgaccatgaatgcggccaagatgatccgtgaagactacctgcaacaaaatgcctttgatgaagtcgatacctatacctctttcagcaagcaggtggccttgttgaccaacattttgacctttgaccaagaaagtcaaaaagcactagaattgggagcttacttcacagaaatcatggaaggaacagtagctcttcgagaccgcattgcccgtagcaagttcatccatgaggatcagttggcaaccattcaagccctgaaagaagaaatcgtagaaaccctacaccaaatcgtcgcaaaaggaggagtagacaatgagcgtgattaaagaataccgtactgtcagcgaagttgttggccccttgatgattgtcgatcaggtcgaaggggttcactacaatgaactggtagaaatcaagcttcatgatggaacgacccgtcagggacaagtcctcgaagtccaagaagataaggccatggtccagctctttgaaggatctagcgggatcaacttggaaaaagccaaagtccgctttaccggacgtcccctagaacttcctgtgtctgaagacatggtcggacgcatctttaacggaatgggcaaacccatcgatggcggtccagagattatcccagagaagtacttggacattgatggacaagccatcaaccctgtttcgcgggactatccagatgaatttatccagacagggatctcagccattgaccatttgaataccttggttcggggacaaaaactcccagtcttctcaggttctggtcttcctcacaaggagttggcggctcagattgctcgtcaagcgacggttcttaattctgaagaaaacttcgccgtggtctttgcggctatgggaattacctttgaagaagccgagttctttatgaacgaccttcgggagacaggtgcgattgaccgctctgttctcttcataaatctagccaatgacccagctatcgaacggattgccactcctcggatcgccttgacagctgctgaatatttggcctatgaaaaagacatgcacgtcttggttatcatgacagatatgaccaactactgtgaagcccttcgggaagtctccgctgcccgccgggaagttccaggtcgtcggggctatccaggttacctttatactaacctctcaaccctctacgaacgtgcaggacgcttggttggaaagaaaggatctgtgacccaaattccgatcctctccatgccggaagatgatatcacccaccccatccctgacttgacaggctacatcaccgaaggtcagattatcttgtcccgcgatctctacaatagcggttaccgcccaccgatcaatgttcttccatccctttctcgtctgaaggacaagggttctggtgaaggcaagactcgggaagaccatgcggcgactatgaaccagctctttgcggcttacgcccaaggaaaacaagccaaagaactggctgtagtgcttggagagtctgccttgtccgatactgacaagctttatgttaaatttacggaccgctttgagcaagaatacatcaaccaaggctttaccaccaatcggacgattgaggaaagtttggatctcggttgggaactcttatccatccttccaagaacagagctcaagcggatcaaggatgagatgattgacaagtatctgccaaacaaagaggattagcctatggcacgattaaatgtaaaaccaactcggatggagcttaatattctcaaagagcgcctcaagacagcaacccgggggcacaagttgctcaaggataagcgggatgaactcatgcgccgctttattgaagctgtacgtgagaataatcgtctgcgccaaaaggtggaagcagcgcttgtgggcaatatgcaagatttcgtgatggccaagtccttagagagcgacctcatggtggaagaaatctttgccgttcccactcgagaagtgatgcttcatattgaggaagaaaatgtcatgagtgtgcgcgtgcccaagctccatgctcgtatcgataatccatacggagatgatgaaggggacgtggtttatagctacttagcctccaacagtcaaatggatagcacgatccaagaaatgggggatctactcccagatttgctcaagttagcggaaatcgaaaaaagctgccaactcatggcagatgaaatcgagaaaacccgccgtcgagtgaacggactcgagtatgcgaccatcccagacctcaaagagactatctattatatcgaaatgaaactcgaagaagccgagcgcgccaacctcgtcagaatcatgaaggtaaaataagatacaaagcgttaagcaactcaaaggaaaatagggagcaggacagaagcactgttgtatagaatgccccccacaaggctgattaggatttttccgagctcttaaagcgagagaaaaatccaatcagctactgtgcctttgaagttagaactattacagtttgcgtttttcacccagcttttcagcccggcctcaattacttaaaaaatacaagaacctcatcgaggaacggctcctggatgaggcttttttgcaccctcacacttcttccactaccctatttttatgttactagtttgtaacaatgtgacaagaaagacgaaatattacaagaaaaatacagttttgttaaatagacaaaaagaccttttattatttttaaattgtgataagatagagtagtagttcatttgttcaagaaaatattgagcaaaaaaacaatgaaaaaagaggataaaagatgaaattaaaagttaatacgaaagccttgatcgcttcaacagtagctcttgcagtgattccatttacaaaagccactgcagaaacacttgaagattgggtagctcgctcagtagatgaaatcaaacatgatatccaacaaagcggtgaaaaccaacaaacttataccatcaaatatggtgatacattgagttcgatcgcagaagcgcttggaatcgatgtacatgtgttggcaaacttgaacaacatcagcaacatggatttgatctacccaggtactgttttgaaaacaacagtaaatgatcaaaaagaagtaacttcagttgaaattcaaactcctcaagcaggtgcgacagatgcaaccgttgcaagtgctgacttgacaacaaaccaagtgacagttgatgaccaaacagtcgctgtcaacgatttgtctaaaccagtaaacgaagataacaaagctgttccagttgctccagcagcgggcactcaagaagctccagtagttgaagtaccagcaacagaaacgccagcacaaccagctgttccagaaacaccaagctacggtgctccagctaccaatgttgaaattcaaaatcaagatgtagcgccagctgctcctcaatctgctcctgcaacagaagcgcctgctgaaacaccagcttctgctcctgaagctccagcacaaccagcagcagaaacgactgctacacctgaagtgcaacaagtagcatcaactccaacaagcggaaatacgattccaactgatccaaatcttaaaccgcaagcggaagctttccgtcaagaaatcgcggcgaaatttggtatcacaaacatcggtggttaccgtgaaggggatccagaagaccatggtcaaggacttgcagtagacgtaatggttccaacaagttctgaacttggagatcaagttgcccaatatgcaattgacaacatggaccgtgcaggtatctcatatgttatctggaaacaacaattctacatgccagtcgacaacatttacggaccagctaatacatggaaccaaatgccagaccgtggtggagatacagcaaaccactacgatcacgtacatatctcatttaacggataataaaacttcgaactaggacaagtgcctagttctttttttgtatacacaaaaaaggccggaagacgaatcttccagccagacgatggttataaaatatgatcgactttttccacctgataaagagcaatggccatgatgatggttaagaccaggagcataagaatggcaggtgtccaagagtgaaagagagatttgctgtagccgaagaggatgggaccaaaggctgcaaagacgtagcctcctgtttgagcaagaccggaaagttgagctgttttttcaggtgtgctggatttcatggagaaagcgaccatgaggtaagggaagagcgaactaacggaacttccaattagggcatttaataccaaccagtagaagaagttgctagtcgggattaagagcatggctacccccagaatccctgctccgacaacaatcgtaagcatcaagcgtcgattgcgatcggataaccgtgtcgttaaacttgggatcgttaaggagaatgggagactgatcagggtgaacacggaggccagtagtccagattcaacctttgaaaggccagcttgaacagccatggtcggaagccaagtcatacttgtgtagaaaagcagtgactgcaagcctccaaaaatcatgatagcccaaacatatttattggtataccacttgctactagattccgtagtagctgtcttttttagatggtggttgtagcgaaggttaggaatccagatgaccaaagcaagagcacataaggctgtcaagatgttgaccaaaccttgccaagaagtggctttggtgatcggaacggccacagaagaggcgatcgctgtggacatccccatagaggtgatgtagagagtcgttagcacaccgagttgcttaggccgattggcctgaatcaagcttggaagcagcacattgagaaaggcaatacttgctccaatcaagatggttcccagatagagaaagggaagattgataatccgaatggcagatccgatcgtaatcacgatcaaaactaggaaaaagaggcgctcaatccccaaccttttagcaaattgaatcgcaaaaggtgagaaaatggcaaaggtgagaagtggtaagctagtcaatagtcccagagagctcacatctacccccaaaccagcagcgatgtcagacaagaccgtcggaagcgtagtaaatggtgttcgtaaaacaatcccaagcataatgatgcccgggatgaatagcatagaatgtgtttttttcataaatcctcctcagacaaaaattcccttcattataacatagatcgagcataaattggagtatttgtacaaatgaaggagaagggacgtagttctcactgccgttcgaactgcatcaatgtacctaagctcactaacgtttgctaagggaataaggaacgtagttttcgctttgctcaaactgcatcaatatctctaaattcggttaaactctctgagttcacctcattaagtattataaagaccgtagttctcactgtcgttcgaactgcatcaatgtacctaagctcactaacgttcgctaaaggaataaggaccgtagttttcgcttcgctcaaactgcatcaatatctctaaattcggttgaactctctgagttcacctcattaagagatatagaaaagccaccggttttggtggctcttatagggagattattatgaaaaagtttaggattttctatcaaacaaagttaggaggtctttatttgatggttttattatatggcggtttgcttaaagaaatcttaagaaaaggcgctgatcgaaagaatcggtctgaagtctgagatgcctttactcactgaagaaatcaatgccggttttgttgagttcattgacccgtaacatgaattttgttttgatttgaacaagcgggcttccgaaattttcgagtgcaatcaaaccttccagggcttttaggacctgtttggcacggtaaaccccttccttgtcatttaagccaaggagggcatagacctgcataaattctaactgcatggaaatactggtgtttaaaatcggtttgcgcttgcgaagctggttaatcgattgaagaaaatttagagcttctaagtagagttcttttttaataagatagttggctagatttaacagcaaagaggccaatgcattggcagagtaagcagaataactgctttcaaaaagttccaaggattcctttcgaatcttagcgacgacttcatagggcaagacagataaaagggcaatggtgaagtcttgctcaatttcattttgataggcaaacggtacttcttgagcgattcgttgaatcgagacaggtgcatcctccaagtggatttcttttcccatcgcgttattgacattgatttcaagcgaacgcaaatagagttgccagagctctttgttctcctctgcaacaggtgatttttcgtgcttcaagcgctcaataatggacagaaaatccatgttttcttgattgatgtgcttcatcaaaatggggctgaaattttgaatggttaagccaggataatgggacaaaaaggtgtcccaatccacccccatagacagcaagaggcgagagaaggtctcgatggttactcctttttgagaacgctcaaattggctgagaaactgaggagagacaatatctgcagcgacttcttttagagaaagaccgcgtgcttcacgaatcttacgaaatgttggaccaaatggcgaagatgaggacataggggacttcctttcaattagcataccattagtatacctcaaaaaagactggaattaaactcagagtttaatttttaacaaaaaaactagaaattcttcgatttttaagaaaaatgaaactatagtttacatggcccttttttagggagggatttttgataaaataaggtcaattctagaagataagcttataacaaaaggagatttacaatgacgacacaagaaattttacagctattagatgaaaagcgcgtgctgacagcccctgcagcagttgcttgggatgaagttcaacggcaacagaaccgattaaatcaagcagcgaagagactcaatgggccaatcacggtcacactggccctcaatcttctttttgcctttacgatttttctgttagaacaaagtcacctgatgcacggttttctactgatgctcggattgatgggtgggctgattgcgatcaaatattttgtatttgtagccccagccaagcaggcacttgccaatgcccaggccctttataaccaggaaatcagccaaccagcctaccaacaagggatgcaaggtttcccgcaaaaattttacaattatcacgacctcttccggctatataacttaatcgcagaaggccgtgcctctaccttgccagaagcctataatctgcttgaaatgcaacaattccaagaaacgcaagtgaatctgcaagaggaagccaatgccctacaagccgatatcgcacgtagctcaagggtcagcgccgttgctaatgtagtcactgcttacaatacttatcgcatccacaaagatatgtaagaaaagataaaagataaaagatgaaaaagcccctcaagaattctgatcgaaaatcagagctctcgtggaggctatttttattgtcttgtaaaaagcagttccgaacggcatccatgtatttaagttcactggtgctcgtaaagagaataaggattgtagttttcactagagttcgaactgcatcaacgtacctaagtttgtctacgcccctattggacttgactcactaagaatagtaaggaacgtagttttcgctccgctcaaactgcatcaatatctctaaattcggttgaactctctgagttcacctcattaaatattataaggatcgtagttcttactatcgttcgaactgcgtcaacgtacctaagctcgctaacgtttgctaaggtacgtagaaaaagccaccggttttggtggctcttatagggagattattatgaaaaagtttaggattttctatcaaacaaagttaggaggtcttcatttgatggttttattataaggctgatttcttaaagaaaacttaagaaaagacgctgtttataagaatcggtcttaggtctgagagatgttgttttttttacaaagctgcagtgggttctaaaatctacaaaaaaatcttgacagaatttgatagaagaggtagaatgttaaccagttaaataaccggttaacaaaaacaaggatacaaacccaatcgaaggtttctgtttaattaaataattaactggttaactaaaataaaggagtaaagagaaattatgaaaaagaaacactatttcatcagcgctgccatcatggcaagtcttagtctttgtgcttatgaactaggctactatcaagctcagcatgcagaaaataaatctaaccgtgtggcgtatattgaggccaagccggcagcaaataaagcagaggagttaacgcctgatgaggtgagccaaaaagaaggaatcaatgcggagcaaattgtcattaagattacggatcagggctacgtcacttctcatggggatcactatcattactataatggcaaggttccttttgatgctattatcagtgaggaactcttgatgaaggatccgacttatcaactaaaaaaagaggatattgtcagtgagattaaagggggctatgtcatcaaggtaaagggaacctactatgtttaccttaaggatgccaagcacgcggataatgttcgtacaaaggaggaaatcaagcgacaaaagcaagagcatggtcatggtgggggaaataaggtcagtcatgaggttgcggaggctcgaaaacaaggacggtatacgacagatgatggctatattttcaatccgtcagatatcatcgaagatacaggtgatgcctatatcgtaccgcatggcaaccacttccactatattccaaaaagcgatttatcaccaagtgagttggctgctgcccaagccttttggtctggaaaagtgggtcgaacaggaggtaaagcccaaccgctttatggaggtagagggggtcaaacgagtcagccagtatcggggggcaatctttctagtctactagaaagcctatatgcccaacctttaagccagcgccatgttgaagcagacggcttggtgtttgatcctgctcaaatcaccaagcggacagctagtggagtggtcgttcctcacggggatcattaccactttatcccttatagtcaaatgtctgccttagaggagcagattgcgcgagtcatcccgatcgggcagactccttcgattgcgtctcaacctagtccaatcgccaaccaaaggcagtccagtcaagcaagtagaccggtgccgtctaggggaaatcaagcacctcaccaaacaggtggagcttatacgacagatgatggttacgtctttcatccgacggatgccatagaggatacaggcgatgcctttgttgtcccacatggcaatcatttccattatattccaaaatcggacctctcaatggcagaattagccgctgctcaagcttattggaatcgtaaaaatcaaggggcgactcctgtcaagcctcgtccggttgtgactgtcaaaccgactagtcctgtcagaacgacaccatcaacgacggatactagtgtgggaagtactccagaaaaaggcttttcggatcttttgaaagaactctacgcgaagcctctcgcagagcgccatgtggaagcagatggcttggtgtttgatcctgctcagatcacgcggcggactgctagtggtgtcgtagttccacatggagaccattaccacttcatcccgtatactcagatgtctgctttagaggagcagattgcaacgatcatccctatcaagagccaaaaagatccggtgcttccacatctacctgttccaagcccaattgaaccgacaccagcgccaagtccggttgttaaaccaagcccagcacctgtgtctccacaaccggaagccaacaagcaccgaatgccggctaagaaagaaggaattgctcctcgtgaccaggaattttacgataaggcttatggacttttaagtaaagcccacgagaaagtgagtcaacaggcagattaccaaacattggatcacttattggcaggattgaataatgagcagacggacaaagccaagttggttgcagaaattttggactttattgctcgagtcattcatccagaacggcttggcaagccaaattcgcagattgcttacacagatgacgaaattcggatggctcaattggcggatatttacacgacctcagatggttatatctttgatgccaaggatatcatcagtgacgagggcgatgcctatgtgacaccccatttgggtcatagtcactggattgggaaagacagtctctcggagaaggaaaaagcagcggctcaagcttataccaaggaaaaaggaatccgtcctcctgaggctgatgcggccaataaggcgaatccaaagggagaaagcgcagcagcgatttatgagcgcgtggttggtgaaaaacgaattccaattgtacgtctaccatataatgttgaacataccgttgctgtgaaaaatggcaatctcatcatcccacacaaggatcattaccacaacatcaaatttgcctggtttgatgatcaaagttataaagcgcccagtggctataccttggaggacctctttgcgaccatcaagtactatgtggagcatccagacgagcgaccacagtcgacagatggctggggcaatgctagtgagcatgtactagggaaaaaagataaaacggaggatccaacaacgaattttaaaccagaagaagaaccggaagtagacacactggctgagccagaagtgccccaagtagagacagctaaggttgaggccaagctaaaagaagcagaagccttactggccaatgtgacagatccaaatctcaaagccaatgcgacagagactctgacgggactaagaaacaatctaagccttgggaccatggataacaatgggatcatggctgaagttgacaaactactcactctcttaaaacaagcaccaactcatgcttcagcgaacgaataaggaggcaagcttatgaaacagaaaaactattgctaccttgtcgggctattgctgttgttgctgagcttgggggcttgtggccaaaagaagtctcaaaaggaggcggggctacatattgtgactagtttttatcccatctactcgatggtaaaagaagtatcaggggatttaaatgatgttcggatgattcagtctggaaatgggattcactcttttgaaccttcagccagtgatattgctgcaatctacgatgcagatatctttgtctaccattcacgaaccttagaatcttgggcaggcgggctggatcccaatctgcaaaaatcaaaggtcaaggttctagaagcctcagaagggatgacacttgaacgtgtaccaggtctggaggatgtggaggcgggtgaaggggtagacgaaaaaaccttgtatgacccccatacttggttagaccctgaaaaggctgcagaagaggcgacgttgattgccaagcgtttatcagaggtagatcccaaacacagggatgtctatcaaaagaacgccaagacctttgctgaaaaagcgcatgagatcacacaaaagtatcggagtgtatttgctaaaaccagtcaaaagacctttgtcacgcagcatacggccttttcctacttgaccaaacggtttgggctcaagcagttggggatcgcagggatctccccagagcaagaaccgagtcccaagcagctgagtgagattcaagagttcgtcaagacctacaaggtcaagaccatcttcacagaaagtaatgcagcctcaaaggttgcaaaaaccctggttcatgcaacaggagccaaactcaaaactctcaatccgttagaagcggatcctcaaaatgatcagacttacttggagaatctggaggctaatttagcagtacttgctaaagaattgaaatagactatttgctcgaaaacctctttctagggaatccattgatgttggatttcttgggaggggtttttcgtctgtttaaaaactatttagatttttttctaaatagagttgacaaaattatatgaaaggtttacaatctatttagaaagatatctaaatagattagattagaggagatagagatgaattttgcgcaaacatttaaagctttatcgaatccgataagaagaagtatcttagaactgctaaaggcggggaaattatctgctggagatatcgctggtcactttgatgtggcagaagcgaccatttcccatcatttaagcctcctcaagcaggcagatttaattcgagaggaaaaagagaagaattttatctactatgaactcaatacttcagtcttggaggatttaatggtctggctcgttgatttgaaaggagactctactgatgaaaacgaataaaaaactattgctattaacttctatggtgatccttttccccatgctttgggggctgatgatttggtcgcaattgcctaaccaaatcccgattcacttcaattttgctggccaggccaataacttccaatcgaaacccctggttgtgtttggtcttcctattttcgatctcatggtgcatctgtttatgatctttatgatcggtcgcgattctaagaatagcgctatgaatgagaaaatgatcagagcgatttactggttgaccccaatcgtttccttaagtacctcctatctcatctatagcaaggcgctaggatctactaccaatccatcagtttttgtttcggttctgctagggctcatctttgtaatcatgggcaattacatgcctaagctaaaagtgaatcacacggttggaatccgtctgccttggaccttgcagagtgaagataactggcacaaaactcatcgcttggcagggaaattgtgggtcctcggagggttgatccttctacttgaagcaggacttcaattcgcactttcttatgttttggtgctggtcatcctcgccattgtgtttatccctatggtgtactcatatcaattaagtcggaaaaatcgttagtaggaaggaaattagatttttaaagaaaacaaccggagaagaaaacttatctgatgggattttccatatgtgaacaataaaagcatttttgttgatttttccctccatttgtagtatagttgtaacgccatacaaactactatatagtaaaaaggagatcattaaatgtattttaatagaaaaaatacagaacaaaagaattggcgaatggttaaaaaagggaaacatttcctatttggctgttctcttgtgttgacagtcggagctgtaatggcttcatcgtctgtaaaagctgatgaaactacagaagctacgacggtatctactgtatcgaacgaagaagatgctacgagcacgtctggaaccaactcctcaacttattctgcacctgcagaaacagtttcttcgacctctacggaatcaacttcaacttctgctacaactgtggaatcaagctctacaactcaaaaggaagctgattctgttcaagccccaagcttaactgcagtagctgatacatcagcattaactgctgaagaaatttcaaatgttacagaagcaattaaaggttcaaatccgactgcagtttctgttcaagttagcaatgatggatctgcagttgttacatttgcagatggctcaagcgcaacattgtcagcttctcaaacagttaaagtgaaggtggaagctacatctggttcagaaactcgctcacgttctcgtcgagctgccactccagcgactggtatcagtacgcgttcttttgactctgaacttcaagatgctgctcaacaggcagcgatctatagcccaggtgtaaaagggcaaaaacaaggttacgaaggaacagtttggctctaccgtaatggaacaatcagcaatgatagtcaagaagatgcaaaacgccttggtggtgtaaatgtctaccttcagtatgtaactggtaaaggctttgtgtcaccagtttacaagacaacaagtgctgcagatggaacttttgtttttgatttgtctaaaccagtgacaaatcgcctaggagctacaggtgagttccaacttgcaggtgatcctaaactttctattcgtacttgggctgaaaatccagatccaacaaaatacactattattaaatctggtgaccaacgtacaggtttccatggtcgtcttagtcgtacaaatgaagcttggaacttcacagctgggattaatcgcattaccaatggtcaagtagttcttcaagaaaaaccaaattcagtagactatcttttgaaaccagaagcagaacgtgaaacaggcgatgctgcagacggccaattctcacgtaatggtatttatggaactattcgtggaagtgtttggtacgaccttcgtgacccaagtggttctgatgcacgtatgtacaaaaaggacagctacgatattaatgctacaaatgttaaggtagcagcttcatacgttaatgatgaagtgacacgtctttttgacaaatggaaaagtgaacactcaaattacaaacttgacgatttcaaggctgctcaagctgaaattatcagagattatgaagcgagaaatgggaaaggttctcacattgctgaaactgtcgtagtaccagttgatagtaatgggaattaccgtattgtattccgcggtctttacggggtaagtgctaacaaagctaatgctggacttgctaaaaaagtttctgatgcggaatttggaacacttgtacgtgacgaagatttagataatgaacaccttatgaagtggaatggtactttaggccaaaaatatcgtcacattaatacggattatgtttatgccactgttcttgttgatgactatgctatttggagcaataactaccaatcgaatatgtttgaaggtacgtcagatgctgttcttccggtaggaccttcatcacttgcggcagcaaatatttcaaatacaaactttgctctaatcgcaccacaaccaatgcacgacatcttggtgtataacaactctgatcactttgctaaaccaggaaatactgctgaaagtaccactggtggactgatgccgtcacgtgaataccaaatccgttgattcaagaatggtcaagcgattggaacagcaacaactgtaacgtcgacagcagatggaactgctagctcagtaccgtttactgtgccatctgatcttacagaagcggcaatctatacttcagcggtctttcttaaaggtgaagacacagatgatctccattcagctttggcacttgattcatttacagccattccaaatgaagatgcggataacaacactccaacagcgaaagctcaaacagtgaacaagggagcaacaccagatcctaaacaatcaattgataatccagacaacctcccaaatggcactaccttcgcttataaggatccagtagatacaactacagcaggcaataaatcagccgtagtagtggtaacctacccagatggatctaaggatgaagttccagtgactgttacagtggtagatccaagtacagatgcggataacaacactccaacagcgaaagatcaaactgttaaaccaggcgatcaaccaaacgctaaggattcaatcggtaacgtaggtgaccttccagaaggaactaagttcgagtacaagacaccggtagacacaacaacagaaggtgaaaaagatgccattgtagtggtaacctacccagatggctctaaggatgaagtaccagttaaggtaactgttaaagccccacatgcaaatacggacaagaacacaccaacttctaaagaccaaacagtgaacaaagttgaaacaccggatgctaagaactcagaaaaagaaattcaagtacaaaaggtatctgtttctgataagaaagctgaatctgctaaacttccaaatacaggtgaagaacaatcaacgtctattgcattgttaggtgctgtacttggtatgtttggacttgcagggcttgcaaaacgcaaaaaaaacgaagactaaattaggtgaccttgatatttttgttgattaggttgtagtctttgttctaaataaaactttttgtcaactgtagtaaggttgatgaaaggttacaatctggagaggaccaaattggttctctctttttgatgtataaagagataaggattttggttttaaaagcatcttttttgggctttaatgagttagttattctttcgaagctcaacggcagctgaaagcattaacgagttttcggagacctatcatttgcaaactttcaacactaaattcatagcaggtcttgctagtaaaaacggcttatatgaatgctagtttttttcttcatctatgctaaaagcctctctaacttttgtaggagaggcttgtttataatgatccgtctttttattttatcttaaaaaggtagagtttgaattgaaatatagcgcaatatacagcattttgcaaaaagaaaaaagcctttgaaatcaacgtttcaaaggctttttcctacttaattatttaacttctgtaaacacaacgtgtttgcgaagttttggtgagtatttcttcaattgaagacggtctggagtgttacgtttgtttttagaagtaaggtacaagcgttcaccagattctttgtgttcaagtgtaatatttacgcgcatggtatctcccttctattattcagctgatgcagctttagcaatcttacgtcctttgtagtatcctttaagtgatacacggtgtgaacgtgagtaatctccagttgtttcgtcaaagtttacagatggagctgttactttgtagtgcgtacgacgtttgtttttcttcgcttttgatgtgcgacgtgcaggtactgccatttcgtttttctccttttaagatataaattcaattaggtttgattttcatcaactttaacagtataacaaaacttttttgtaaagtaaagttacttgacaaaaaattgttaaaaaaatctcccgccccatcaaatgggacaggagttctccttaaaggtctatttcaaatggctcatcaatcgtttccgaaacgtatttgccatccttttttcgttgtttgacacattctgtcagcaggtactcgatctgcccattgaccgatcgaaagtcatcttctgcccatgatgcgatagcagcatataacttggctgacaatctaagtggaatctgttttttcttttggtcagccattcttaatagagacttcccgtattaacaattggttgtgcatcatgattgccacagagaacgacaagaaggttcgaaaccatggcagccttccgttcttcgtctagctctacaatctctccttcgctcaggcgttcaagggccatttcaaccatcccaactgctccgtcgacaatcatcttccgcgcatcgataatggcagaagcttgttggcgttgaagcatgacagctgcgatttctggagcataggccaagtaggtaatacgagcttcaagaatttcgagcccagcatcttttacacgtgcttgaatctcttctcgaatacgactggccacaatttcactggaacctcttagactaccctcatctgcctggccgtctcctgtcgtatcgacattaggagctacatcataaggatagatgcggacaatattacgaagagcactatcacactgcaatgagagatattctttgtagttatccacattgaagactgctttagccgtatccactacacgccaagtgactgcaataccgatttctacaggatttcccaaacagtcattaatcttctgacgagagttattcaaggtcatcacttttaaggaaatattctttttacctgtctcgatagaaatattgttaccttctgctgtttttctgacagacatgggtgacttggtggtgacatcaccactttggcccaagcgggtgttattggcaggattgacagcgacacagaagggattgacaaagtaaatacccgcttctcgaatggttccaatatagttcccaaacaaggtcaaaaccaaggcctcttgcggtttaataattttgatccccgcatagcacaccagactagcaataaagagaaaaatacaggtaataactgcaatcgcaagtggaaaaccttctggtagactagcaatcgcactaataaaggctaaaactaagacaagatccccaactagcaagcctataagggcggctaagccgtttttcttttgggttaaaattttttcttccatgggacgaacccttctttctttatgatatctaaatgatatcactttgctaacaaaagtcaagatataactgtaaattattttagcaagaaagcgagcaagctgaattgtctgaaaattcaagaattttcttctgtcgtctgctccttcaaagttcttgcctatctttgtggcctcttttatgctataatggtaaaaaatataacgagaggaatgacatgacagaattagacaaacgccatcgtagtagtgtctacgatagcatggtaaaatctcccaaccgtgccatgcttcgcgcgacgggaatgaccgatgaaagctttgagaaaccgattgtcggagtgatttcgacatgggcggaaaataccccttgtaacatccacctccatgattttggaaaattggccaaagaaggtgtgaaagatgcaggagcttggccggtccaatttggcaccattacagttgcggacgggattgctatggggactccaggaatgcgcttctccttgacgtcacgtgatatcattgcggattctatcgaagctgctatgggcggtcacaacgtggatgcctttgtagccatcgggggctgtgataagaacatgcctggttcgatgatcgccattgccaatatggatatcccagcgatctttgcctacggaggaaccattgcaccgggtaatctgaacggcaaggatatcgacttggtttctgttttcgaaggaattgggaagtggaatcacggcgatatgaccgctgaagaagtgaagcaattagagtgtaatgcctgccctggccctggtggctgtggtgggatgtatacggccaataccatggcgacagcgatcgaggtccttgggatgagcttaccaggttcatcttctcaccctgctgaatcagcggataagaaggccgatatcgaagaagcaggtcgtgctgttgtcaagatgctggaaatgggactcaaaccatctgatatcttgacccgtgaagcttttgaagatgcgattacagtgaccatggcgctaggtggttccaccaatgccactcttcacttgcttgcgatcgctcacgcagctaacgtggacttgacgctggaagacttcaacgatttccaagagcgcgtgcctcacttagctgacttgaaaccatcaggtcaatacgtcttccaagacctttacaatgttggtggtgtgccagccgtcatgaaataccttcttaagaatggttttcttcacggagatcgcatcacatgtactggtaaaacagtagctgagaatttggaagcctttgctgatttgacaccaggtcaaaaagttatcatgccgcttgaaaatcctaaacgtgccgatggtccattgatcatcctgaaagggaacttggctccagaaggggcggttgccaaagtatcaggtgtgaaggtccgtaacatcacgggtcctgctaaggtctttgactctgaagaagctgccattgaagccgttctttcagacgagatcgtggatggcgacgttgttgttgttcgtttcgtaggtcctaagggtggtcctggtatgccggaaatgctgtccttgtcatccatgattgttgggaaaggacaaggagacaaggtggctctcttgacagacggacgcttctcaggaggtacttatggtctcgttgtcggtcacattgcgcctgaagctcaggttggtggtccaatcgcctacctccacacaggggatttggtaacggttgaccaagataccaaagaaatcaccatgcatgtctcagacgaagaattggcgaaacggaaggcagaaacaaccttgccaccactgtatagccgtggggttctgggtaaatacgcccacatcgtttcttcagcatcacgtggtgctgtaaccgacttctggaatatggaacagtctggtaaacaataattgcaaggacgactttgtccaaagagagagtgggacagaaatcggtaattcgttagaattcgatttcgtcgtcccacctccgcacagttgagtagggctgtaaaagctgatgaaatcagtgtagtagagcccactcaactactgcgtcttgctcgacaatccaaaaataattgagaggctaggacttttgtcccagcctcttttttggctcaaagtcgctatttttaactctgtcgctgaagcgtatgaatattactttttgggggatttgagtgtattatctgtcatttttcttgtaaatccgtctataatttgctataattgtgactaatcgaatcaatcctttaatactgtccagagaggcaggcaaggagctatggaaatgaaaggcctgggaagaccagcctatattttgtgtatctccttgttgtgggggatttttttgtatagttgaaaagtggtttgatgaaaaaagagaaatcgtcgatgatggagcatgagcactcccttatgattcggtcatcgaaggtagatgtttttattcagccataacttgttgcatctttaatttaggaggtttttacgatcgtgaataatgtaaaatatgatgtatctgatatgcctaaaccaggcttgctggttggtttatcattccagcatttgtttgccatgtttggggcgacagtactggtaccaattttggttggaattgatcctgccattgccctcttctcatctggtttgggaaccttagctcacttgacggtgaccaagtataagattcctgcctacatggggtctagttttgcttatattgctgctatgcagatgttgatgaaaacagatggaatcgcagcagttgctcaaggtgccatggcgggtggtttggtctacctcttggtggccttgattgtcaaatttgctgggaatgcctggattgataaagtacttccaccgattgtagtagggccaattatcattgtgatcggtttgagccttgcctcaacagctgtgagcgatgcgaccatgatcgatgggaaatacagcggtacgagcctgcttatttcaatggtcactctttttgctgttattctctttaatatgtatggcaagaaaattatcggagtgattcctattttgctagggttgatcgtaggttatctcttctctcttgtcttaggtctggttaccggccaagagattgtccactttgcatccgttgcttcagccaagtggttccaaattccaagctttgatattccatttgttaattatgattttaaattgtacccaagtgccattttgaccatggctccaattgcttttgtgacgatgacagagcactttggtcacgtgatggtcttgaatagtctgacaggtcgagatttcttccaagatcctggtttggaccatactcttacaggagatggtttggcacaaatcattgcaggatttttcggagctcctccggttacatcttatggtgaaaatatcggggtgatggccttgaataagatctattcagtatatgtcatcgcaggtgcagcagtgattgcggttgtcatgagctttattggtaaagtatcagctcttttgaattcgattccgaccgctgttttgggtggtatttcgatcgccctctttggagtaattgcggccagcggtttgaaaatcttagttgaaaacaagattaattttgataataaaaagaatctcttgattgcaagtgtgatcctagtatcaggaatcggtggtttggttttccaaattgggggacttcaaatcactggtgtcgcaacgtcaacaattcttgggattgtgttgtatcaaattcttccagaaccaaaagttgatgaggcttagtccattctggtagtgaacaagtttgaatggattcaaacatcataaaaaacgaggaacaaactctgatggcagagctggtgttcctcgtttatttattatggatcggatttccaaagaggtcttccttcattagttgactgcgtttcttaaatggtaatgattgttatcgtggtggaagaccaagggcgatgcgcccgtatcggctgattcgtgtaattttccaagcgggtgaccaggtcacttcgaccttgacatcttcgatcccttcgatctcttttaggcgagcgacgatttcgatcggaaggctctcagcacagctacaagccgtatcggtaaaggtcataaccaccttgcaagtgccggcttcatctagatggatctcgtagatcagtcccagattatagacatctaactcaacatcggtatcaaatacaagctccaatttttcgattaacgacttctctagtgccagggcacggtcattgattttgatatcctctctcatcgcaagatcctttcagtgtagtatggattccattttctcataattcaggccataaggcaagaagagaaagaggttttgaacgtgtcgaacgaaggaaattcgatccagcctccatttctcttcgaatttgtggtaaaatagaggcaaaagtaagacaaaggatgaaggctatgaaattacaaaaaccaaaagggacccaggatatccttcctggcgattcagcgaaatggcaatatgtagaaggctttgcacgcaaggtctttgcgcgataccattatgatgaaatccgcacaccgatcttcgaacattatgaagtcatcagccgttcagtaggggatacgacggatatcgttaccaaggaaatgtatgacttctatgataagggagaccgtcatatcacgcttcgtccagaaggaacagctcctgttgtccgctcgtatgtagaaaataaactctttgcgcctgaggtacaaaaaccaagtaagttctattacataggcccaatgttccgttacgaacgtcctcaagcaggtcgtttgcgtcaattccaccaaattggggtagaatgctttggatcgagcaatcctgcaacggatgtcgaaaccattgccatggcagcgcaattcctgaaagaactagggattgataatgtgaccttgcacttgaacaccttgggaagccctgccagtcgtcaggcttatcgtcaagccttgattgattacctcttgccaatgaaggatcaattgtctaaggacagccaacgtcgcttagaagaaaatccgcttcgtgtcttggattcaaaagaaaaagaagacaaggcggcggttgaacaggctccttccatcctagactatctagatgaagaaagccaagcgcattttgatgcggttcgtcggatgttggaagacttgggagtagcctatgtcattgataccaacatggtgcgtggcttggattactacaaccacacgatttttgagttcattacagaaattgaaggcaatgaattgacagtctgtgcaggtggtcgctatgatggtttggttgaatacttcggtggccctgcgacagctggttttggatttggtatcggtgtggaacggatccttctcgttcttgaaaagaaaggcattgaattaccgatcgaaacaggcctagatgcctatatcgctgtcctaggagatgaggtcaatgaagcagcgcttagcttggttcaagcccttcgaatccaaggtttcaaggcggaacgtgactatcttggacgcaagctcaaggcacaatttaagtcagcggatgtctttgcggctaaagccttgattaccttaggaagtagtgaagttgagagcggtcaagttactgtgaaaaataaccaaactcgtcaagaagtaacggtagctcttgaaagcttgaagaaagacttcccatctgttttagcagagttgggattggcttgatcaagtcttgcagacacctgtaaaacagattcgcatgggagtaggagcaaagtcgttgctcctgctctcttttatctagcttctgtttgccgacctttgccaagatttggcgaaaagccgttaaattttctgacatttatgatataatgagaagataacaagtaaaggaatgaatcagtcatgacattagtttaccaatcaacacgagatgaaaaaaatactgtaacagctagtcaagctatccttcaaggattggcgacagatggcggtttgtttactccagtctcttatcctcaagtagagctggattttgataccctcaaagacgcttcttaccaagaagtggccaagcttgttttgtcagcctttttggacgactttacagcagaagagttggactactgtatttctcatgcttatgacagcaagtttgatactccagctattgctccgcttgtcaaactcgatgggcagtacaacttggagctcttccatggttcaaccattgcctttaaagatatggctttgtcgatcttgccttactttatgacaacagcagctaaaaagcacggtttggaaaataaaattgtcatcttgacggcgacttctggagatacaggaaaagctgccatggcaggttttgcagatgttccagggacagagatcattgtcttttatccaaaagatggtgtcagcaaggtgcaagaattgcaaatgacgactcagactggagacaatacccatgtcatcgccatcgatggaaactttgacgatgcccaaaccaatgtcaaacacatgttcaatgatgtggcgcttcgtgaaaaattagcagccaacaagatgcaattctcatcagccaactctatgaacattggtcgtttggtgcctcaggttgtctattacgtatacgcctatgctcaattggtgaagacaggccaaatcacagcgggagaaaaagtcaactttaccgtcccaacaggaaactttggaaatatcttggcagctttctatgccaaacaaatcggtcttccagttggaaaattgatctgtgcatcaaatgaaaacaatgtcttgacagacttcttcaaaacacatgtctatgataagaaacgtgagttcaaggtgaccactagcccatcaatggatattttggtctcttcaaacttggaacgcttgattttccacttggtaggcaatgatgccacaaagactaaagagttgatggaaagcctcgttgcaacaggtcagtaccagttgtccaactttgatgcagacatcttagatttgtttgcggctgcatacgcagatgaagcagaaactgctgcagagatcaagcgggtctatgaagcgtctgattacatcgaagaccctcatacagccgtagcatcagccgtttatcaaaaataccggacccaaacaggggatactgctaaaacagttattgcctctacagcaagtccttacaaattcccagttgtagcagtagaagcggtgacaggtgagacaggtctaggcgatttcgaagccttggctaaattacacacactctcaggtgttcctgtgccaccggctgtagacggccttgaaactgcaccggttcgccatcgtacaagtgtggcagccaaagacatgcaagcagccgtagaagactacttgggactttaattctctgtattagaaagatcaaaagagccgtttggctcttttatatactcatgaattcatacaaaaaaatcttaaacatcgcccttcctgccatgggtgaaaatttcttacaaatgctgatgggcatggtggactcttatttagtggctcacctgggcttgattgccatttcaggtgtttccgtcgcagggaatatcatcacgatctatcaagccatctttttggcactgggtgcggcagttgccagtgtcatgtccaaaagcttgggtgaaaaaaatcaagaaaatattgcctaccatgcgacagagtcactgaaggtgaccttactgttgagtgctctcttaggaggggcttcgctgttatttggacgccagatgatttcgctgttagggactgaagctgcagtagccgaaagcggggggatttacctttccttggtcggcgggaccatagttctcttaggattgatgacgaccttgggctccttggttcgggtggccaacaatccacgtattcctatgtatgtgagcctgttgaccaatctattaaacgctctgttctcctctgtggccattttcctttttggctggggcattgtcggcgcagctttggggacggtgctggcccgtctggtgggcgtcatcctcttgtggcaaaaggtccagctaccttttgcaccccttcgttggggattggatcgtaagctcttgaacttagcacttccagctgccggagagcggctgatgatgcgggccggagatgtggtgatcattgcgatcgtggttgcttttgggaccgaggcagtcgcaggaaatgctatcggagagaccctgacccagtttaattatatgcctgtatttggagtggccacagcgacggttatgctcgtagcacggagcctgggtgaaggtgatcttgagcagattgcccgccttcgaaagcagtcttactgcttgtcctttgtattaatgttacctattgccttgggaatcttttttgggggcactcttctgacccatctctacacacaggatgtgaaagcggtagaagctagcctatcggttgtcctcttttctttgttgggaacaccatttacagcaggaacggtcatctatacagctgtttggcaaggtttgggaaatgggaaacttccattttatgcaacgacgattggtatgtgggtcattcgaattggagccggttatctgcttggggtgacccttggctttggccttccaggggtctggactgggacgctactggacaatggctttcgttggctatttttgagtcagctatatagacgaaaagtaggagaggagaaaaaatgacaaaacgagcctttatttgggatttggatgggaccttgctggattcctatgatgctattttagcaggtcttgaggagacctatgcaacttatcagcttccgtttgaccgaaccagcattaaagatttcatcttgaagcattcggttcaagatcttttagtagccgtggcagaggagtatcatctggatgtgaccgacttgaatcatcgccgagcagaaagtctagcggagaaaaatgcccaggtccttctgatggatggggcgcctgatgtcctatcctggggacaagaagctggaattgagcagtttgtctttacccataagggagagaatgcctttgtcatcctgcgggacttgggcttggaatctttttttacagagattttgaccagtcaaagtggttttgcccgcaagcctgacccagaagctaccatgtatctgatggagaagtacgggttggagccagaaaatacctactatattggggatcggagcctggatattgactttgcaagaaatagccagattcagagtatcaatttcttgacgtctgactatcaaggcaatcatcagatgaacaccttactagatatcccaggtattttaaacgctgaaaagaatctgtaaagaatttgttttcattttgaaataaagtcgtaagctttctttaagaaatgtccgctataataaaagcataaacaaagacctcctaactttgtttagaaaaatcctaaaacttttctttttcataataatctccctaagagtcgccaaatcaggcggcttttttgtgtgaaaaaacagtgcaagctcttttccttgcaagaggatatgaaatattttataattgattagtcaattattgatttataaaaaataatacggagaaggaatatggcagaaataaatgatttgctctaccaactacgtttggcagatcaatcaactacgcaactttttgaaaagcgcctagggattagcttaacacgttatcaaattttgcaggatttattagaacaagcgccttgcaatcagatcgcggttcaggaacgcttgcagattgatccagctgctttaacgcggcatttcaaaattttagaaaaggaaggatttgtccatcggagtcgaaatccaaagaaccagcgggaaatcttaattcatttgacggatacggcctataatcgtttggtcaaacatccccctcgccatcatgtggcggtgaaagaacagatgagtcggattttgactgctcaagaacaagagcagttttcttacctgctggacagattagtatctggcattgaacaaataacagttgaataaaaaggagaatctacaatgtcattactgacgataattttagcaagtcttgctgcactggagcatttatatattttttatttggagagcatcagaaccacatctgataccacaagtcgggttttcaacatggataaagaagaactcgctcgcccatctgtgacctctttatttaagaatcaaggaatatacaatgccttgattggtgtgttcctcttgtatggattgtttgtctctaaaaatattgaagttgttacgatttttgtgctctttattattggagctgcggcctacggtgcgatgacagccaataaaaagattatcttaacccaaggtggtcctgcaattttggctttgttgagtatcctatttttgggataaaaaagacgttccgctaggaatctttgagctgattttattaaattagtgtagaaaaaagtataaaaaaagactaaaaattttattgactttcgaagaaaaagggttataatggtagcaacagaaaagtaatgagtcggctattttcagggagcttgtgggaattgtgaacaagcaatagcgactgatgaaaattggactgttatgatcaatgaattctaacccatgtgaattcggttggcaccccttaccgtgcaactccttgatagaggagatagagatgtagggaaagaccagctatttttccctataaaagaggtggcaccgcggacactacgccctcacacagtttttgtgtgagggcttttctatgtgccttagcaagcgaagcgcgcttaggcacattgatcccaaaacgagaattgagcgatgggatacccttgatcgccttagcaagcgaagtagggtacggttgaattccttagaataaaagagttctagaagagaggtttctgatatgaaaaaagttttatctgctgatgtgttgagtccaattttggcttatatgcgtttggatgcgccccataaaatgatcttggagtcgatccctcgtgaaaaagagaatgcgcgtttttcaattgtagcctatcggccagtcagtgaagtcaagtttgaaaatggcatcctctattacaatgatcaaattgtcgaagaggatcctttggactttttgaatcgcatcacggtcaaaaggaaaacttcagaggaactcccttttaacggtggggcgattggatttgttggctatgacttgattggcctctatgagaacattggttctattccggaagatacgatcggtacaccagatcttcactttttcttatatgaaagctatgtgatttttgatcacaaaaaggaaaaggtttatgtggtggaagagaacctctatagtggacggagtgaagcagagcaagcgtcgagcttggagcaagtgttagcacaattggcaagacctgcaaaagaagagtttcaggacaaggacctgcatgcgcttcatttccacaatcatttggagcaaaaagagtttgaggaaatggtggccctagcgcgggactatattcgaaaaggagatatgttccaatgcgtgctcagtcaacgtttttcagctgatttttcaggtaaaccattggattattaccgcaatttgcgcgtgaccaacccttcgaattatctctacttttatgattttggggagtaccaaattatcggtgccagtccagaaagtctggtgtcagtcaaggatcgagtggtgacgaccaatcccattgctggcacacgtcccagagggatcgatgaagaggctgatcggcaattggcagctgatttggcaggggatccaaaagaagtcgcagaacaccggatgttggtggatctagggcgaaacgatattggtcgtatcgctcaaaatgggtcggttgaagtgaccaaatatatggaagtggagttcttccgttatgtgatgcacctgacgagtgtggtcaagggtcaattacttcctggactagcctctattgaggcactgaaggcaactcttccagctgggaccgtttcgggtgctcccaagattagagccatgaagcgaatctatgaggcagaaaaagagaaacgaggagtctacgcaggtgctattggctatctctctgtgacgggggatctcgattttgctattgcgattcgaaccatgatcctcaaaaataagaaggcttatgtgcaggcaggagcaggaatcgtttatgattcgatcgctgaaaatgaataccaagaaaccgtcaataaggcaaaatcaatgacaaggattggagaagaaggatgattttattagtcgataattacgattcatttacctacaatttagcacagtatatcggaaaatttgatgaggtccaggtgcttcgaaatgatgatccggatttgtaccaagttgcccaagaagcagatgccttggtcttttctccaggtccaggttggccaaaggatgcgggcaagatggaggagatgatccgagattttgcaggggtcaaaccaatcttggggatttgcttggggcatcaagcgattgcggaagtttttggagggcgcttgggattggcgccacaggtcatgcatggcaaacaaagccagatccagctagaagctccctctccgctatacgcgggtgtcgcaaaagaagtcccagtcatgcgctaccattcgctgacgattgaagacatgccagaggattttgtcattacctctcggacgacggatgatcaagcgattatgggaattcaacaccgtagcttaccaatttatggttttcaataccatccagaaagtatcgggacgccagatgggctcaagaccatcgaaaattttgtcaaactagtcaaggagcggaagatgaaacaagtgcttgcaaaagtagcggaaggaatggatctaaccagtgcagagttagaagctgccatggaggaagtcgttgctggtcgtgcttcagaagcgcaggtgacggcccttcttctaggtctcaaaatgaagggagaaacggttgaagagcggacggctattgcaaaagtgatgcaggcctatgcagtcgctattcctacaggagttcaagaagctatggacaattgtggaacggggggcgatcgttcttatagtttcaatatttcaactacagctgcatttgttctcgctggtggtggcatcaagatggcgaaacacggaaatcgttcgatctcttctaaatctggttctgcggatgtactagaagctctagggattaaccttgatttgggtccagaagacttgggacgagtgtttgaaaaggcgggaattgtcttcctatttgccaaaaatctgcatcctggcatgcgctatattatgcccgctcgcttggcgctaggggttccaacggtgatgaacttaaccggtcctcttatcaatccgattcctctagaaacccagctattgggaaccagtcgtccagatatgctggaaagtacggcggagattctaaagaatttgggtcggaaacgcgcagtggtggtgagtggcccacaaggtttggacgaggcaggccttgatggagaaacccagctcgctattctggaaaatggacaggttaccttatctagctttcaaccagaagatatcggaatggagcgcattaaaatagatcaagtacgaggtggagacgccaaacgcaatgcggaaattttgctcagcgtcttggagaatgaagcaagtcccttcttagaggtgacggtcttaaatgcaggccttggtttttatgccaacggcaaggtagattctatcaaagaggggattgccttggcacgtgaagtgattgccagtggggccgcccttgagaaattgagattattacaggagtatcaaaaatgagtcaagaattcttgccaaagattctaaaggaaaaggcgcgtgaagtggctgcgatgaaagaagaggagctccaacctttgcgcgagacctaccgcttgtatgattacctaaagagtcatccagaaaagcttcagatcatcgcagaggtgaaaaaggccagcccgagtctgggagatattcatgtcgatgtggatatcgtcgcgcagactaagacttacgaagaaaatggggccgtgatgatttctgtcttgactgatgaagtgtttttcaagggcagtatcgaatatctccgggaaatatctagtcaagtacgtatccccaccctcaacaaagatttcattgtggatgaaaagcaaataattcgggcgcgaaacgcaggggcaaccgtgatcttgttgattgttgcagccttatcagaggctcgtctgaaagagctttatgagtttgcgacccatctgggcctggaggtcttggtggagacccataatctgacagaactagaggtggctcaccggattggggctcagatcatcggggtcaataatcgcaacttggtgacctttgagacagatctccatactagccttgaattagcgacaagctttgaacaagaaccggtctatatctctgagtctgctattttcacagcagcagacgcgcgcatgctggctccttattttagtggcattctcgttgggacagccctcatgaaggcagacaatgtggctgaaaaagtaaaggagttacagattgacaaaggttaaaatttgcggactatccactccggaagctgtccagacagctgttgaagccggtacggactacattggttttgtctttgcaccaagcaaacgtcaagtaacactggagcaagctcggcagttggctacagggattccagagggggttcaaaaagtcggtgtttttgtatcaccacaaagagaagaagtggagcaggcttgccaagttgtgggcttggatctgatacaggtgcatggaccgatagatgataccatcttgcaagagcttccccaacagacgactcgcgctgttcaagtggggaaagatgcagctcttcctgagaccagtgccgattatctgctctttgatgctcctgtagcaggaagtgggcagacctttaactggcaagaactcgaaacccaaaacttcacaaagcccttctttattgcaggaggcttgacggaagacaatgtagcagatgccattcgcctctttcatccttatgcggtggatgtatccagtggggtcgagacaaatggaataaaagatcaagataagataaaacgatttatagaaagggtcaagcatggcatataaacaaccagatcaaaacggattttacgggcggttcgggggacgatttgtccctgaaaccttgatgacagcagttttagaattagaagaagcctacagagaaagtcaagcagatccttcttttcaagcagaattggatcagcttctgaaacaatatgtcggtcgggaaacaccgctctattatgctaaaaatctaaccaagtatgtcggtggagccaagatctttcttaaaagagaagacctcaaccacacaggggctcataaaattaataatgccctaggacaagttttattggcacatcggatgggcaaaaagaagatcatcgcagaaacaggggccggacagcacggtgttgcaacagcaacagctgctgctttatttgatatggaatgcaccatctacatgggggaagaagatgtcaaacgccaagccctcaatgtctttcggatggaattgttgggcgccaaggttcaatcagtaacagatgggtcacgtgtcctcaaggatgcggtcaatgctgcccttagagcctgggtagcaaatgtggaggatacccactatatcatggggtctgctctagggcctcatccattcccagagattgtccgtgattttcaaagtgtcatcggtcgagaagccaaacgccaatttgcagagcaaaatgatggtgcgctaccagatgcagtcttagcctgtgtaggaggcggatcgaacgccattgggctcttttatccttttgttgaggatacctctgttgccatgtatggggcagaagctgctggccttggagtggatacagaccagcatgcagcaaccttgaccaaggggcgtccgggagtccttcacggagccttgatggatgttttacaggatgcccatggacagattttagaagccttctcgatttcggcaggtcttgattaccctgggattgggccagagcattcttatttccatgacatcaagcgggcaacctatgtgcctgtgacagaccaagaagccctagaagcctttcaattgctttcgaaagtagaaggaatcattccggccctggaatcgagccatgctatcgcctatgcggtgaagttggctaaggagatggggcctgaaaaatccatgatcgtttgcttatcaggtcgtggggataaagatgtggtacaagtcaaagaccgcctagaacaagagagaggagagtaagatgggaaagaccttaacagagcatttacaaaagctgaaagaccagcagcaagggatctttgttccttatattatggcaggagatcatgaaaaaggcttggcaggtttgcaggaaaccatccaatttttggaggagcttggtgtctcagctattgaggttggcattcctttttcggatccggtggcagatggtcctgtgattgaagaggcgggactacgaagtttagcccatgggacgacgacagaggaactggtgcaaacgatccagcacttagagacaagtgttcctttggtcatcatgacctatttcaaccccttgttccaatatggtctagaaaacttttttagagatgtagaaggaacagcagtcaagggagtgattattcccgatcttcctcatgagcatgcggatctggtagagcctctattagcggataaagacatcgccttggtgccactagtgagcttaaccacaggaatcgagcgccaaaagaaattgatccaagatgcagaaggatttatctatgccgttgctgtcaatggagtgacggggaaagctggtagctatcgagatgatttagatcatcacttggcccaattacacgaaatagcgtccattcctgttttaacaggttttggagtttccagcatggaggatgttcaccgtttcaacaaggtctcagatggggttattgtggggtctaaaatcgttaaggctctccaccaaggggagacagacgccatcgctcgttttatttctcaagcagtgaagggctagaaggttcattccattcatcatcagcttgattctcctagatcaagctctttgtctactattttaaacattcccctcgtttgtctttacaaacgaggctttctcgttacaatagaggtagtaacaagaaaagaggagaagagaatgataagccttgaagagattgatcaagttgtccagtcaggtccttttgaaccaagctgggactctcttagccatcaagtctgtccggattggtatcgggatgccaagtttgggatctttatccactggggcgtctacagtgtacctgcctttggttcagaatggtattcacgaaatatgtatatccaagggaatccttgttatgactatcatcgagagcattttggagaccaggccagctttggctacaaggatctcattcctctttttacagccgatcgatttgatccggcatcttggctggatctctttcaaaaagcgggagcccagtatctttttccagttgcggagcaccacgatggttttcagatgtatgcctctactctctcgccttataatagcttagaaatggggccgagacgagatgtcttaggagagctgaggaaggaagcagaaaaacgtggcctgcacttctgtacgtcctctcaccgggcagaacaccagtttttcttttcacatggcaaggaattcactagtgacattccgcaagaagtcccaagagacagcctttattggccagcggagccagagcccaaggatcattttgatctgacttccaagccttatccaagcaaagaattcttggaagattggctgttgcgaacctgtgaactggtgcgggactaccaaccagagctcctatattttgactggtggatccagcatgagagtttccgtccctacttgatgcgctttttggcttattattacaatctagcagcacaagaggatcgcaaggtggctgtttgttacaaacaggatgccctccctttcggttcaggaatcgtcgagatggagcggggaggatacggagagacgcaagcctttccgtggcaaatggataccgcgatcgcccgtaattcttggtgctatacccaggatttagcctacaagaccagtaaggaattgctacaaaatttagttgatgttgtggcaaaaaatggcaatcttctgctcaatattggacccaaggcagatggcacgatccctgagcaagaccaagacatcctcacagagatcgggaactggctggcggtaaatggagaagccatttatcagagtcggccttggcgggtgtcatcagacggaccgaccgaggcccaggaaggttccttctcagatgggcaagcgccactctatactagccaagatttccgctataccatgcgtgatggctttctttatgctatccagctggaaccaagtggaaggacggaagggttgaccttgccgtctctcgcctatgatctcaagcaaccgagaattcttcatgcgcgcattcaaaagctagagctccttggagaaagccagcccctttcttggagccaagatgagacagggctccatcttcagttaccagcttgtagcaaaaaacaaccgcgtgttttgcgcctcagcttttagttttcttgaagctttctataaggaattgtttaggtttatcttgtatactgtactcattcaataagaaatgaggtacagaaaatgaaaatctcagttaattatccaaaacgctttaagaaattgccacaacaaggttcttgttacggcgaataaacatttctcttcatttttcataagaaactcctaaagaaggctctacccggaagggtagagtttttatgtaccagagaccttgtgattcgtggtataataggcctatggaaaaaaagaataaattattactcatcgacgggtcttccgtcgcttttcgtgcctttttcgcactctatcatcaaattgatcgcttcaaaaatgccaatggtctgcataccaatgcggtctatggctttaatctcatgttgagccatctcttggagcgcatccaaccaacccatgtcctcgttgcttttgatgcaggaaagacgacttttcggacggagatgtatgccgactacaaagggggccgtgcaaaaactccagatgagttccgtgagcagttccctttcattcgtgagcaattagaccatctgggaatccgccattatgagctagcccagtatgaagcggatgatattattggaacgcttgataagatggcagaagctacctcagtaccctttgaagtcaccattgtctctggggacaaggatttgatccagctgacggatgacaatacggtggttgaaatctccaaaaaaggggtggcagagtttgaagaattcactccagcctatctgaaagaaaagatgggactgacaccagagcaatttatcgacctcaaggccttgatgggagataagtcggataatatcccaggtgttactaagatcggagaaaagaccgggatcaaactactcctagagtacggctctcttgatggcatttacgagcatatcgacgagatgaaggcttctaagatgaaggaaaacctcatcaacgacaaggagcaggcctatctgtctaagactctcgcaaccatcgataccaatgcacccattgaaattgggctggacgatatcacctatacgggccctcatctagaaaatctcgccaagttttatgaggagatgggcttcaagcaactccgtcaggccttggatctcagtggagaagaagcagctcctgtagctattgactatacagaagtcgagcaagttgcttcagatatgctcacggaagatagtttcttccattttgagatttttggggacaattaccatacggaacccatcatcggtttcgcatgggggaccaaaggtcagctctacgcgagtacagatactggtcttttacaaacaccgattttcaaagaatttctcgaaaaaacgcccctcaaggtctatgacttcaagcgggctaaggtcttgctcagccacttgggcattacccttcaaaatcccgcttttgacagtcgattggccaagtatctcttgtcgaccgtagaggacaatgaaatttcaaccattgcgagtctctatagtcagattgcgctgccgctggacgaagtcgtttatggcaagggagccaaaaaagctatcccagaaaaggcggtcctattagagcatttggcactgaaagtcgctgttctactggataccgaagagcccatggtggagcagttgcaagcccatgaccagctagatttgctctatgatatggagcaaccgctagcagctgttttggccaagatggaaatcgcggggatcaaggtagagcgccagaccctagaagacatgcaggtggaaaacgaagtagtcttggagcgcttgacccaagaaatctacgagctggcgggcgaagagttcaacatcaattctccaaaacaattgggggtcatcctctttgaaaaattggaactcccacttgaatatacgaaaaagaccaaaaccggctattcaacagccgttgatgttttggaacgcctggctccaattgcaccgattgtgtctaagattcttgaataccgccaaattgctaagatccagtcgacctatgtcatcggtcttcaagattggattttggaagatgggaagatccatacccgctatgtacaggatttgacgcagacgggccgtttgtccagcgtggatcccaacctgcaaaacattcctgtccgtttggaacaaggccgtctcatccgcaaggcctttgtcccagaagaggaaaacagtgtcttgttgagttcggactattcacaaatcgaactgcgcgtcttggcccatatttcaggagatgagcatttgattgatgcctttaaacatggagcagatatccatacatcgactgctatgcgggtcttcaatattgaaaaaccagaagatgtgacgccgaatgaccggcgcaatgcaaaagcggtaaacttcggtgtggtttatggaatttccgactttggactgtctaacaacctagggatcagtcgaaaagaagccaaggcctacattgagacttacttcgaacgctaccctggtatcaaggactatatggagagagtggtacgggaagcgcgtgacaaaggctatgtagaaaccctcttcaagcgtcgtcgggagattccagatatcaattctcgcaacttcaatgttcgaggctttgcggagcggacggctatcaactcaccaatccaaggatctgcagcagatatcttgaaaattgccatgatccacttggatcaagcgctagaaagaggagcatacaagaccaagatgcttcttcaggtgcacgatgaaatcgttctgcaagtaccaagtgatgaactggcagcgatcaaagaacttgtcaaagagaccatggaatccgctattgaacttgcagtaccactggaagctgatgagaacgaaggcaaaacatggtatgaagccaaataagattaagtttgttcaaaacagaaagcggtaggaaacttttcagtttcctaccgcttttaactacaaacacttgcaatgccctccgtattgttatactatttaaagaaaggaaacgcatacaaaaggagattcttatggcttattcatttcgcaatcctagtgatggtattatcaaacattacctagaaaccagcaagatcatcgctgtggttggattatctgaccgtgaagatacgaccagtcatcgtgttagcaaggagatgcaagagcggggctatcggattattcctgtcaaccctcgtgcagctggtggccagattcttggagaaacggtgtacgctagcttgcaggagattcctttcccagtagatatcgtcgatgtataccgtcgcagtgagtttttaccagatgtagcacgtgattttattgagacggatgcgaaaattttctgggcacaattggagctggaaaatcaagaagcagaagaaatccttcgtggagctggacgagaagatatcgtcatgaaccgctgtatcaaacgggaacacacccgattgatcttaggagattccctgtacggtttataaatgctaaacaattgacatagaagaaaaccccagcaagctggggttttcttcttactcttattcagtttcatggcttggatggtctgtgaaatggcgcggcccttgtttaatctgcttgatttgatcataaaatgcaatttggcagttgataaagtaaggcatggtatagaagctgatgacatcgcgcgtgaagtaattcaagaagtaccaaccaatcaaggttaggtcgagcactaggcgattgctacggaaccctttcatggtttcacgactttggcgaaggactccaaaggctcccttgtagtcgccgtctcgtaattgctcgtagaggatcaattcgaccaggctgagactgtagtattgtggcaggtaaaagaggaggccgagtaggcccagtacgacaccagcagtcatcagaggcatttgttgcatgagagattggaattcaggactggaagcactcagagtgctagggttgctcaccttatcgtagatcgccaaaaatcgaatgctggcgtaggtgctgatgagactacccacatagaggatgactccccataaaaagaggacggcttgcttcaaaatcaaggtggcaaatacagaggtaaagcgatcttgtttaaagatatctaacacccgtgttcggtgctcgatcttgggattaatcgtatctaaatagctaaaagtcgcaccgaccactaaaatggagatgacaaaggagacgacggaaggaaagagctgtcgctggatcatgtagatacttgcttgctgcaaggtcatatccggtagtagatcgaccagatcttgcccacttaagaggaagttagcaagaatggtcaacaggaccggaagagcaaaaaggatagctaagcccggttgctggacttgcatggtacgtgcccggaggcgaatcagtttaaggttcatagatgacactctcttcatagtagtactttttattataacataagtccgtgacagagccggtaaaatttggtacaatcgtacaggtgctcacaggaaaactgtgacaggaataagaaggctgggactgtttttcccagtacggaggtaaccatgacagattcaccgattcaatatcgattaatcaaaaaagaaaagcatacaggtgctcgtctgggagaaattatcacccctcacgggaccttcccgaccccaatgtttatgcctgtagggactcaggcaaccgttaagacccaatcgccagaagaactcaaggaaatgggttccggaattatcttggccaacacctaccatctctggcttcgtcccggggatgaactagtcgcaaaagcaggaggactacaccagttcatgaactgggaccagccgattttgacagatagtggaggcttccaggtctattcattagcggatacccgcaatatcactgaagaaggggtaacttttaaaaaccacctcaacggctcgaagatgttcctctctccagaaaaggccatctccatccaaaacaatctagggagtgacatcatgatgtcctttgatgaatgccctcagttctatcagccctatgattatgtgaaaaaatcgatcgaacggaccagtcgttgggcagaacgtggcctaaaggctcaccgtcgcactcatgatcaaggtctattcgggattgtccaaggggctggatttgaagacttgcgccgtcagtctgctcaagatctggtcagcatggactttccaggctattccatcggtggcttagctgttggggaaagccatgaagagatgaatgccgtgctggatttcacaactccgctcttaccagagaacaagccgcgctatctcatgggagtaggagctccagacagtctgatcgatggcgttattcgtggagtggacatgtttgactgtgtcttgccgacgcggattgcgcgaaacggtacctgtatgactagtcaaggacgcctagtggtgaaaaatgcgcaatttgcagaagactttacaccgctggatcctgaatgtgattgctacacttgtaagaattacacccgagcttatcttcgccacctcctcaaggcagatgaaaccttcggcattcgcttgaccagctaccacaacctgtacttcttgatcaacctcatgaagcaggtccgtcaagccatcatggatgacaatcttttagaattccgtgagcatttcgtcgaaaaatatggctataacaaatcaggacggaatttctaggaaaagctaaataggaagaaaaaagactacagccatctgagaataataggaataactgctagacgcagtggttgattggtatctttgaagcttgttaagctccaaagataacctaatcaactgtgcgggggcgagacgacgaacaaattggatataaatttgttctgtctcgctcccttttcctatataatagcaacttttttagcactctatttctttcgaaaacactttcatcaaaaaaacgaaaaaaatcttctcaaatcccttgcattgggcctttgtttgtgttaaactactatggtgctgtgaaaaacagctattagctttgatgcaagaggttgcgacacgctcggttgcattgccacgcaacgcgcgtcggttttcttgtggagctagcctattatcttaaatagacgaaaaggagaaaaagatggcaaacaaaaaaatccgcatccgtttgaaagcgtacgaacaccgtacactcgacacagcggctgcaaaaatcgtagaatcagctactcgtacaggtgcacaagttgcgggtccaatcccacttccaactgagcgtagcctctacacaatcattcgtgcgactcacaaatacaaagattctcgcgaacaatttgaaatgcgtacacacaaacgtttgatcgacatcatcaacccaactcaaaaaacagttgacgctttgatgaaattggatcttccaagtggtgtaaacgtagaaatcaaactttaatctaaaggttgatccagagcatgaaaaacgctcgttaaaaactttttgaataaaaaactatagaaaaggaactattttctcatgacaaaaggaatcttagggaaaaaagtgggaatgactcaaatcttcactgaagctggcgaattgatccctgtaacagttatcgaagcaactccaaacgttgttcttcaagttaaaactgttgaaacagatggttacaacgctatccaagttggtttcgatgacaaacgcgaagtattgagcaacaaacctgctaaaggacatgtagcaaaagctaacacggctcctaagcgcttcattcgtgaattcaaaaacgttgaaggcttggaagttggtgctgaaatcacagttgacactttcgaagctggagacattgttgatgtaactggtacttctaaaggtaaaggtttccaaggtgttatcaaacgccacggacaatcacgtggacctatggctcacggttctcgttaccaccgtcgtccaggttctatgggacctgttgcacctaaccgcgtattcaaaggtaaaaaccttgcaggacgcatgggtggcgatcgtgtaacgattcaaaaccttgaagttgtacaagttgttccagaaaagaacgttatccttatcaaaggtaacgtaccaggtgctaagaaatctcttatcactatcaagtcagcagttaaagctggtaaataataaggaaaggggaatacagtcaaaatggcaaatgtaacattattcgaccaaactggtaaacaagcgggcgaagttgttcttaacgatgcgatctttggtatcgaaccaaaccaagcagttgtatttgatgtgatcatcagccaacgtgctagccttcgtcaaggaactcacgcagttaaaaaccgttcagccgtttcaggtggcggacgcaaaccatggcgtcaaaaaggaactggacgtgctcgtcaaggttctatccgctctccacaatggcgtggtggtggaattgtcttcggaccaactccacgtagctatgcgtacaaacttcctcaaaaagttcgtcgccttgcacttaaatctgtttactcagaaaaagttgctgaaaacaaatttgtagccgttgattctcttgaatttacagctccaaaaactgctgaatttgcaaaagttcttgcagctttgagcatcgattctaaagtccttgttattcttgaagaaggaaacgaattcgcagctctttcagctcgtaaccttccaaacgtgaaagttgcgactgctacaactgcaagtgttcttgacatcgcaaatagtgacaaacttcttgttactcaagcagctatctctaaaatcgaggaggttcttgcataatgaatttgtatgatgttatcaaaaaacctgttatcactgaaaagtcaatggctcaacttgaggcaggcaaatatgtattcgaagttgacactcgcgctcacaaacttttgatcaaacaagctgttgaagctgcctttgaaggtgtaaaagttgcgaatgtgaacactgtaaacgtaaaacctaaagcaaaacgcgttggacgttacactggttttacttcaaaaactaaaaaagctatcatcacgcttgcagctgattctaaagcaatcgagttgtttgctactgaagctgaataatctaaggaggaaatatcgtgggaattcgtgtttataaaccaacaacaaatggtcgccgtaatatgacttctttggatttcgctgaaatcacaacaaacacacctgagaaaactttgcttgtttctcttaaaaacaaagcaggtcgtaacaacaacggtcgtatcactgttcgtcaccaaggtggtggacacaaacgtcattaccgtttgatcgatttcaaacgtaacaaagatggagttgaagcagtcgttaaaacgatcgaatacgatccaaaccgctcagctaacatcgcgcttgtacactacactgacggtgtgaaagcttacatcatcgcccctaaaggtcttgaagtaggtcaacgcatcgtatcaggaccagaagcagatatcaaagtcggaaatgctcttccacttgctaacatcccagttggtactttgatccacaacatcgaattgaaacctggtaaaggtggagaattggtacgtgctgctggagcttctgctcaagtattgggttctgaaggtaaatatgtacttgttcgtcttcaatcaggcgaagttcgtatgattcttggaacttgccgtgctacagttggtgttgtcggaaacgaacaacatggacttgtaaaccttggtaaagcgggacgtaaccgctggaaaggtgttcgccctacagttcgtggttctgtaatgaacccgaatgatcacccacacggtggtggtgaaggtaaagcaccagttggacgtaaagcgccatctactccttggggtaaacctgcgcttggtcttaaaactcgtaacaagaaagcgaaatctgacaaacttatcgttcgtcgtcgcaaccaaaaataatcataagcaactagcttacactttccgccagctcggtagcgctgcctagcagcgcaagccgctgtggtactaaattttaaaggagaaaattacaaaatgggacgtagtcttaaaaaaggacctttcgtcgatgagcatttgatgaaaaaagttgaagctcaagcaaacgacgaaaagaaaaaagtaattaaaacttggtcacgtcgttcaacgatcttcccaagtttcatcggatacactatcgcagtttatgatggacgtaaacatgtacctgtttacatccaagaagacatggtaggtcacaagcttggtgaatttgcaccaactcgtacttacaaaggtcacgcggcagacgacaagaagacacgtagaaaataaggagaacataaatggcagaaattacttcagctaaagcaatggctcgtacagtgcgtgtttcacctcgtaaatcacgtcttgttcttgacaacatccgtggtaaaagcgtagccgatgccatcgctattttgacattcacaccaaacaaagctgcagggatcatccttaaagtgttgaactcagcagtagcaaacgctgaaaacaactttggtttgggaaaagctaacttggtagtatctgaagcgttcgcaaacgaaggaccaacaatgaaacgtttccgtccacgtgcgaaaggttcagcttcaccaatcaacaaacgtacagctcacatcacagtagctgttgcagaaaaataaggaggtaaactcgtgggtcaaaaagtacatccaattggtatgcgtgttggtatcatccgtgattgggatgccaaatggtatgctgaaaaagaatacgcggattaccttcatgaagatcttgcaatccgtaaattcattcaaaaagaattggctgacgcagccgtttcaactattgaaatcgagcgcgcagtaaacaaagttaacgtttctcttcacactgctaaaccaggtatggttatcggtaaaggtggagcaaacgttgatgcacttcgtgcagctcttaacaaattgactggtaaacaagtacacatcaacatcattgagatcaaacgtcctgacttggatgctcaccttgttggtgaaggaatcgctcgtcaattggaacaacgtgttgctttccgtcgtgcacaaaaacaagcgatccaacgtgctatgcgtgctggagctaaaggaatcaaaactcaagtgtcaggtcgtttgaacggtgcagatattgcccgtgcagaaggatactctgaaggaactgttccacttcacacgcttcgcgctgatatcgattacgcttgggaagaagcagacactacttacggtaaacttggtgttaaagtatggatctaccgtggtgaagttcttccagctcgtaaagacgctaaaggaggtaaataaccaatgttagtacctaaacgtgtaaaacaccgtcgcgaattccgtggtaaaatgcgcggtgaagcaaaaggtggaaaagaagtagcattcggtgaatacggtcttcaagctacaactagccactggatcacaaaccgtcaaatcgaagctgctcgtatcgccatgactcgttacatgaaacgtggtggtaaagtttggattaagattttcccacacaaatcatacaccgctaaagctatcggggtacgtatgggatctggtaaaggggctcctgaaggttgggtagcaccagttaaacgtggtaaagtgatgttcgaaatcgctggcgtatctgaagagatcgcacgcgaagcacttcgtcttgctagccacaaattgccagttaaaactaaatttgtgaaacgtgaagcagaataaggagaggtcatgaaacttacagaagtaaaagaatttgttaaagaacttcgtggtctttctcaagaagaactcgcgaagcgtgaaaatgaattgaagaaagaattgtttgaacttcgtttccaagcagctgctggtcaattggaacaaactggacgtttgaaagaagtgaaaaaacaaatcgctcgtatcaaaactgttcaatcagaagctaaataatagactagggaaggagaatttcaatggaacgcaataatcgtaaagttcttgttggacgcgttgtgtctgacaaaatggacaaaacaatcacagttgtagttgaaactaaacgtaaccacccagtctatggtaaacgtatcaactattctaaaaaatacaaagctcatgatgaaaacaatgttgctaaagaaggcgatatcgttcgtatcatggaaactcgtccgctttcagctacaaaacgcttccgtcttgtagaagtcgttgaaaaagcggtcatcatctaatcatacctgaaaggagaaaacgtaaatgattcaaacagaaactcgtttgaaagtcgctgacaacagtggcgcacgcgaaatcttgacaatcaaagttcttggtggttcaaaacgtaaattcgcgagcatcggtgatgtaatcgttgcatctgtaaaacaagctactcctggtggtgcggttaagaaaggtgacgttgtaaaagctgttatcgttcgtactaaatcaggtgctcgtcgtaaagatggttcatacatcaagtttgacgaaaatgcagcagtgatcatccgtgacgacaaaactcctcgcggaactcgtatctttggcccagttgcacgtgaattgcgtgacggtggtttcatgaagatcgtatcacttgctccagaagtactttaatcaataaaaaacaaacacagtcccctggcttagccagggtgcccatcgggcgtaagaataaaaggagaataaaatgtttgtaaaaaaaggcgacaaagttcgcgttatcgctggtaaagacaaaggcgtagaagctgttgttcttactgctcttccaaaagtaaataaagttgttgtagaaggtgtaaacatcatcaagaaacaccaacgtccaaataacgaaaaccctcaaggcgcaatcgttgaaaaagaagctccaatccatgcttctaacgttcaagttttggacaaaaacggtgttgctggacgtgttggctacaaatttgtagacggcaaaaaagttcgctacaacaaaaaatcaggcgaagtgcttgactaatcacgaaggaaaggagaagtataatggctaatcgtttaaaagaaaaataccttaatgaagtagtaccatcattgactgaacagttcaactattcatcagttatggctgtgccaaaagttgataaaatcgttttgaacatgggtgttggtgacgcagtatcaaatgctaaaaaccttgaaaaagctgctgaagagcttgctttgatctcaggtcaaaaaccattgattactaaggctaaaaaatcaatcgccggcttccgtcttcgtgaaggtgttgcgatcggtgcaaaagttacccttcgtggtgaacgcatgtacgaattcttggataaattggtaacagtttcacttccacgtgtacgtgacttccatggtgttccaacaaaatcatttgatggacgcgggaactacacacttggtgtgaaagaacaattgatcttcccagaaatcaactttgatgatgttgataaaactcgtggtttggatatcgtaatcgtaactacagcgaacacagacgaagaatcacgtgcattgcttactggcctcggtatgccgtttgcaaaataatataggaggtaaaactaatggctaaaaaatctatgattgctaagaacaaacgcccagcgaagttctctactcaagcatacactcgctgtgaacgttgtggacgtccacactcagtttaccgcaagtttaaactttgccgtgtttgcttccgtgaattggcatacaaaggtcaaatcccaggtgtcacaaaagcatcttggtaatttaagatatcaagggcgttaaaactccaagtgaaaataggaaacttgacgaagaaactttagtttctaggaaagtttatctttttcacacagagtttagcccgggttcagttgggcttgccaatttgaacacgagctacagctttggcaaaaaagaccaattttctttggagcatcgctcctgcatcaaattgcctatttttgctctcgctgttacgctctctgtatcatgtattaactagcaagtgcaacttgcaaactactagtaagaggagaaattataatggttatgactgacccaatcgcagacttccttacacgtattcgtaacgctaaccaagcaaaacacgaagtacttgaagtacctgcatcaaacatcaaaaaaggaattgctgaaatccttaaacgcgaaggttttgtaaaaaacgttgaattcatcgaagatgacaaacaaggcatcatccgtgtattcttgaaatacggacaaaacggtgaaaaagttatcacaaacttgaaacgtgtatctaaaccaggtttgcgtgtttacaaaaaacgtgaagatcttccaaaagttcttaacggacttggaattgctatcctctcaacttctgaaggtctgcttactgataaagaagcacgccaaaagaatgttggtggagaagttatcgcttacgtttggtaatatttagctcccaatttcgttgtgactcttcattattgtctcttgtctaacccaaagttatgtctgcgagacaatgcctcgattcacttagaaattgagacctaaacattaacttttaaatcaaaaagatttaaaccccgtgaaaactggcccgcaaaggcctgacaatttaacaggagaataaaaaacatgtcacgtattggtaataaagttatcgtgttgcctgctggtgttgaactcactaacaatgacaacgttgtaactgtaaaaggacctaaaggagaacttactcgtgagttctcaaaagatattgaaatccgtgtggaaggtactgaagtaacacttcaccgtccaaacgattcaaaagaaatgaaaacaatccacggaacaactcgtgcccttttgaacaacatggttactggtgtatcagaaggattcaagaaagaacttgaaatgcgcggggttggataccgtgcacaacttcaaggatcaaaacttgttttggctgttggtaaatcacacccagacgaagttgaagctccggaaggaattacttttgaacttccaaacccaacaacaatcgttgttagcggaatttcaaaagaagtagttggtcaaacagctgcttacgtacgtagccttcgttcaccagaaccttataaaggtaaagggatccgttacgttggtgaattcgttcgccgtaaagaaggtaaaacaggtaaataatgtagtttggttgtttttcaaccaatcttcatcttaccaactcagtgcttagcacatgattttaaaattaagaggtgaaaattgtgatttcgaaaccagataaaaataaaatccgtcaaaaacgccaccgtcgcgttcgcggaaaactctctggaactgctgatcgcccacgtttgaacgtattccgttctaatacaggcatctacgctcaagtaattgatgacgtagcgggtgtaacgctcgcaagcgcttcaactcttgacaaagaagtttcaaaaggaactaaaactgaacaagccgttgttgtcggcaaacttgttgctgaacgtgcagttgctaaaggtatttctgaagtggtgttcgaccgcggtggatatctatatcacggacgtgttaaagctttggctgatgcagctcgtgaaaacggattgaaattctaataggaggacactagaaaatggcatttaaagataatgcagttgaacttgaagaacgcgtagttgccatcaaccgtgtaacaaaagttgttaaaggtggacgtcgtcttcgtttcgcagctcttgtagttgttggtgaccgtaatggccgtgttggatttggtactggtaaagctcaagaagttccagaagcaatccgtaaggctgttgaagatgctaagaaaaacttgatcgaagttcctatggttggaacaacaattccacacgaagtaacatcagtatttggtggagctcgcgtattgttgaaaccagctatcgaaggggctggagttgctgcaggtggtgcagttcgtgccgttgttgaattggcaggaatcgcagatgtgacatcaaaatcacttggatcaaacactccaatcaacatcgttcgtgcgactgttaatggtttggcacaattgaaacgtgctgatgaagttgctgctcttcgtggtattccagtttctgacttggcttaagaaaggagattcaaatggctcaaattaaaattactttgactaagtctccaatcggacgcatcccgtcacaacgtaaaactgttgtagcacttggacttggcaaattgaacagctcagtcatcaaagaagataatcctgcagtccgtggtatgattactgcagtatctcacttggtaactgttgaagaagttaagtaattaaacttaattataagtgttttaggggttatgagatttattctcagcccctaaaactaaatttattcgtataggcgagtttgtagttgggacaccttttcctgattacatgcgttagcaatttacaaaagaggagaaaatatataatgaaacttcatgaattacaacctgctacaggttcacgtaaagtccgcaaccgtgttggtcgtggtacatcatctggtaatggtaaaacttctggccgtggtcaaaaaggtcaaaaagctcgtagcggcggcggtgttcgtcttggttttgaaggtggacaaactccattgttccgtcgtcttccaaaacgtggatttacaaacatcaatgctaaagagtatgctattgtgaaccttgatcaattgaacgcctttgaagatggtgctgaagtaactccagtagtacttgtagaatcaggaattgtaaaagctgaaaaatcaggtatcaaaattcttggtaacggagaattgactaaaaaattaactgtgaaagcagcaaaattctccaaatcagctgaagaagctatcactgctaaaggtggttcagttgaagtcatctaagtgaggtgacctatgttttttaaattattaaaagatgcatttaaggtaaaacaagtacgatcaaagattttatttacgatttttatcattcttgttttccgcattggaaccacgattacggtgccaggtgtaaatgcgaaaattctgaacaaccttcaagatgtgtccttcttgaacatgctcagtttagtttcgggaaatgctatgaggaacttctcggttttcgctttaggggttagcccatacatcacagcttcgatcgtcgtgcaacttttgcagatggatctgttacctaagtttgttgaatggggcaaacaaggggaagttggtcgaagaaagctcaatcaagcgacacgctatatttctttggttttggcctttgtccaatccattggaattacagccaccttccacaccttgtctcaggcgaaattagtcgctactccaaatgccaaaacttatctgttaatcggtgcgattctgacgaccggttccatgattgtcacttggcttggagaacaaattacagataaagggtacggaaatggtgtttcaatgattatctttgcagggattgtgtcatcaattcctgagatgattaaagaaatctatgaaaatgcatttgtgaacgttcgctctggtcaaatgaccaattccctcatttttgttggagttttaattcttgcagttatggttatcgtttactttacaacctttgtagagcaagcacaatacaagattccagtccaatatacaaagattgcacaaggagctccatcaagttcttaccttcctttgaaagtaaacccagcaggagttattcctgtcatcttcgctagttcgattaccgcagcgcctgctgcaattttccaagtgattagcgctatggggtacaatgcaggatgggtgaaaacagctcaagctatgttggcaacaaatacaccaactggtgtagcgatgtacgccttattgatcattctcttcactttcttctacacgtttgttcagattaatcctgaaaaaacggcagaaaaccttcaaaagagtggcgcctatattccgggtgttcgtcctggtaagggaacagaagagttcatgtctcgtttgctacgtcgtttagcaagtgttggatcagtatttcttggttttattactatcattccaatcctagctcgagatttatttggtttgacagacgcagttgctcttggaggaactagtttgttgatcattatttcaacaggtattgagggaatgaaacaattagaaggctacttattaaaacgtaagtatgtcggatttatggacacaacaacagaatagattaaggttgactttgtcagccttctattttgtttttaaatggaaataggaattcgctcctgcttccatttaaaaacaaaataaggagaattcatcatgaatcttttaattatggggttgcctggagcaggtaaaggaactcaagcagctaaaatcgttgaagagtttcacgtagcgcacatctctactggcgatatgttccgcgcagcgatggctaaccaaactgaaatgggtgtgcttgcaaagtcatacattgataaaggtgagttggtaccagatgaagttaccaatgggattgtcaaagaacgccttgctcaagatgatatcaaagaaacaggtttccttttggatgggtatccacgtacaattgaacaagctcatgctttggatcaaactttgtcagatcttggcatcacattggaaggtgtcattaacatcgaagtaaatccagaaagtttgttagaacgcttgagtggccgtttcatctgtcgtacttgtggtgcaacttaccacaaagtatttaatccaacaaaagttgagggaacttgtgataactgtcaaggtcatgatttctaccaacgtgaagatgataaaccagaaacggttaaacgtcgtttggatgtcaatattgcacaaggagaacctatcattgagttttatcgttcaaaaggactcgtacatgacatccaaggaaaccaagatatcaatgatgtattttcagacattgaaaaagtcttgtcaaatttgaaataaaagcgtttttcatgcttgcaatattggacaactagtgttacaattagttagtctgacttataattgttacctctgtgctcagaggaatgaatcgaaatttatggaggtacttttgcgtggcaaaagacgatgtgattgaagtagaaggtaaagtagttgatactatgccgaatgctatgtttacggttgaacttgaaaatggacatcagattttagcaacagtttctggtaaaattcgtaaaaactatattcgtattttagcgggagatcgtgttacagtggaaatgagtccgtacgatttgacacgtggacgtatcacataccgctttaaataatcgaaaaacttggagggataaaaatgaaagtaagaccatcggtcaaaccaatttgcgaatactgtaaagtaattcgtcgtaatggtcgtgttatggtaatttgcccagcaaatccaaaacacaaacaacgtcaaggataaaatagaaaggagaaaacatggctcgtattgctggagttgacattccaaatgacaaacgtgtagtaatttcattgacttatgtgtacggtatcggacttccaacatctaagaaaatccttgctgctgcaggtgtttctgaagatattcgtgttcgtgatcttacaccagatcaagaagatgctatccgtcgtgaagttgacgcaatcaaagttgaaggtgaccttcgtcgtgaagtaaacttgaacatcaaacgtttgatggaaatcggttcataccgtggtatccgtcaccgtcgtggacttccagttcgtggacaaaacactaaaaacaatgctcgcactcgtaaaggtaaagctgttgcgattgcaggtaagaaaaaataaaataaaataaggaggtaaaaatcttggctaaaccaacacgtaaacgtcgtgtgaaaaagaatatcgaatctggtattgctcacattcacgctacatttaacaacacaattgttatgattactgatgtgcatggtaacgcaatcgcttggtcatctgcaggtgcacttggatttaaaggttctcgtaaatctacaccatttgctgctcaaatggcatcagaagctgctgcaaaagctgctcaagaacacggacttaaatctgttgaagtaactgttaaaggtcctggttcaggtcgtgagtctgctattcgtgcacttgctgctgctggtcttgaagtaactgcaatccgcgatgtaactcctgtaccacacaatggtgctcgtcctccaaaacgtcgccgtgtataatcatcaacaattacacagcttttcgtttaagagggagtatagcaaatgattgagtttgaaaaaccaaatataacaaaaattgatgaaaacaaagattatggcgtgtttgtcgtagaaccacttgaacgtggttatggtacaacacttggaaactcacttcgtcgtgtacttctggcttcacttccaggtgcagctgtcacttcaatcaacattgaaggtgtactccacgaatttgataccgttccaggagtccgtgaagacgttatgcaaattattcttaacgttaaagggatcgccgttaaatcttacgtccaagacgaaaagattattgaacttgatgtagaaggacctgcagaagtaactgctggagatattcttactgatagtgacatcgaaattgtaaaccctgatcattatctatttacaatcggagaaggagcatctttgaaagcaacgcttactgtaaacagtggacgtggctatgttccagctgatcaaaacaaaaaagatgatgcaccagtgggaacacttgctgtagattcaatctatacgccagtgacaaaagtcaattaccaagttgaaccagcacgcgttggtagcaacgatggatttgacaagctaacccttgaaattttgacaaatgggacaattattccagaagatgccttaggtttgtctgcccgtattttgacagaacacctaaatctattcacaaacttaactgaaattgctattgcgacagatgttatgaaggaagtagatacaacttctgatgatcgcattttagaacgtacgatcgaagaattagatctttcagttcgttcatataactgtttgaaacgtgctggcattaatactgtttacgatttgactgaaaaatcagaagcagaaatgatgaaagttcgtaacttgggacgtaagagtctagaagaagttaaaatcaaacttgccgacttaggccttgggttaaaaaacgataaatagaggaggaatacatggcttaccgtaaactaggacgcactagctcacaacgtaaagcgatgcttcgcgatttgactacagatcttatcatcaatgaagcaattgtaacaactgaagcacgtgcgaaagaaatccgtaaatcagttgaaaaaatgattactttgggtaaacgtggtgatttgcatgcacgtcgtcaagctgctgcattcgtacgtaacgaagttgcatcacaaaactttgatgaagaaacaggtaaatactcagaaacaactgcacttcaaaaattgttctctgaattagcacctcgttatgctgagcgcaatggtggatatactcgtatccttaaaactgaaccacgtcgtggtgatgctgcgccaatggctatcatcgaattggtataatatcatcaattttgttgagtgttatgatgatggaatacactgttattcttagtctagctctggtctaccgctggggattttccccagcgggaacactcatcatattgaatgaatggtagacgcttgtttacgaaattgctttaacttaaaacaatttcgtaagcaggcgttttgtcttgcttttcatgatgagtagtcgagaatagcaaaaaatgatataatggaacccatatctccaattgaagaaaaaaggattcaatgacaaaacaacaagcaattaaattactaaaagagaagtaccttagtaatatgaaagaggattcggaactctttgtcggagttgaattagagtttccgattgtagaaacaaatggaaataaaacaaatatagaggtgacgaaaaatctttttcgaaccttagcaaacttatcagattttgaagtcgaaaaaagggatgacgatcaaaatccaattcaattggttcactgctcttctaaagatcgtattctattcgagttgagttacaatacaattgaatttgcatttgagaaagctcattctatagatgaggtagccaaacgttttgaggcctatttgaagatcattcaaccgattttgcaagaaaataatcacgaaattcaagggcatggaatccatcctatatggaaagaaaatgataatagcccggtgaaaatcgaacgatacaagatgttaatggctttccttgcaatgaatggtacagggatgaaaacacacccctatccttcgtacggagcatttatatgcggaaaccaagttcaattggatgtaaggcgcgataactatattcgcatcattaatgcctttaataaaattgaagcagcaaaagcatatttgttttctaactcagaattttcatcagaggcttgggatacaaaaattgcaagagatatcttttgggaagaatccttacatggttattatagggagaatgtaggaatttttcctaaggactaccaaagcgaagaagagttttttaataatcttgctagaacggctatttttacagtaactagagaaggtaaatcttattattttaaaccaattcgagtggaggactatctagatcaaaaagaaattatagcctatacgactgatggaaaagagaaaaacattaaccctgtaaaagaagacctaaaacaacatcgaagttaccaatttcaagatctaaccgcccgtggtacagtggaatttagaagtgtttgtacacaaccattagaaacaacctttgccccgatagcatttgagctaggcttatttgtacagttagaaaaactagaaaactatttagaacattgttcattcttaaaaaatgaaaaacaggactataggaacctcagaaagaaatattcaaagaaaattctaagcaaaaaagaaaaagaaaaaataaaaaccttttcaaaggaacttctagaaatatctaagtcaggattgcttgaaagaggctatgaagaggaaaaatatttaatcattgataaagaattaaactaagagaaaagcctttattgtaggctttttttcgatttttttaaaaaaatcttaaaaaaagtaaaattttttttaaaaaagtgttgacagtaaggagaggtcatgatatactaatatagttgtcgcgagagagcggcaaagacctttgaaaactgaacaagacgaaccaatgtgcagggcactacaactgaagttgtagtaactgaacaataaaaaacaataaatctgtcagtgacagaatgagtttaagacaaacaattattttaatgagagtttgatcctggctcaggatgaacgctggcggcgtgcctaatacatgcaagtagaacgctgaagcttggtgcttgcaccgagcggaggagttgcgaacgggtgagtaacgcgtaggtaacctgcctcttagcgggggataactattggaaacgatagctaataccgcataaaagtcgacattgcatgatgttgacttgaaaggtgcaactgcatcactaagagatggacctgcgttgtattagctagttggtgaggtaacggctcaccaaggcgacgatacatagccgacctgagagggtgatcggccacactgggactgagacacggcccagactcctacgggaggcagcagtagggaatcttcggcaatggacggaagtctgaccgagcaacgccgcgtgagtgaagaaggttttcggatcgtaaagctctgttgtaagagaagaacgagtgtgagagtggaaagttcacactgtgacggtaacttaccagaaagggacggctaactacgtgccagcagccgcggtaatacgtaggtcccgagcgttatccggatttattgggcgtaaagcgagcgcaggcggttagataagtctgaagttaaaggctgtggcttaaccatagtacgctttggaaactgtttaacttgagtgcagaaggggagagtggaattccatgtgtagcggtgaaatgcgtagatatatggaggaacaccggtggcgaaagcggctctctggtctgtaactgacgctgaggctcgaaagcgtggggagcaaacaggattagataccctggtagtccacgccgtaaacgatgagtgctaggtgttgggtcctttccgggactcagtgccgcagctaacgcattaagcactccgcctggggagtacgaccgcaaggttgaaactcaaaggaattgacgggggcccgcacaagcggtggagcatgtggtttaattcgaagcaacgcgaagaaccttaccaggtcttgacatccctctgaccgctctagagatagagctttccttcgggacagaggtgacaggtggtgcatggttgtcgtcagctcgtgtcgtgagatgttgggttaagtcccgcaacgagcgcaacccctattgttagttgccatcatttagttgggcactctagcgagactgccggtaataaaccggaggaaggtggggatgacgtcaaatcatcatgccccttatgacctgggctacacacgtgctacaatggctggtacaacgagtcgcgagtcggtgacggcaagctaatctcttaaagccagtctcagttcggattgtaggctgcaactcgcctacatgaagtcggaatcgctagtaatcgcggatcagcacgccgcggtgaatacgttcccgggccttgtacacaccgcccgtcacaccacgagagtttgtaacacccgaagtcggtgaggtaaccttttaggagccagccgcctaaggtgggatagatgattggggtgaagtcgtaacaaggtagccgtatcggaaggtgcggctggatcacctcctttctaaggaaaaggaaccctgtacgttggtcttgtttagttttgagaggtcttgtggggccttagctcagctgggagagcgcctgctttgcacgcaggaggtcagcggttcgatcccgctaggctccattaacactatagtagtgttaaacttgaacattgaaaattgaatatctatatcaaatagtaacaagaaaataaaccgaaacgctgtaaatatttaaagagtttaggtcgtaagaccaaaaataaggttaagttaataagggcgcacggtggatgccttggcactagaagccgaagaaggacgtgacaaacgacgaaatgctttggggagctgtaagtaagcgacgatccagagatgtccgaatgggggaacccactagctaatggctagtactcctatctgttaaggataggtagaggaagacgcagtgaactgaaacatctaagtagctgcaggaagagaaagcaaaagcgattgcctgagtagcggcgagcgaaacggcaggagggcaaaccgaagagtttactcttcggggttgtaggactgcaatgtggacttaaagattatagaagaatgacatgggaaggtcagccaaagagagtaagagcctcgtaatcgaaatagtctttatacctagcagtatcctgagtacggcgggacacgagaaatcccgtcggaatctgggaggaccatctcccaaccctaaatactctctagtgaccgatagtgaaccagtaccgtgagggaaaggtgaaaagcaccccgggaggggagtgaaatagaacctgaaaccgtgtgcctacaacaagttcgagcccgttaatgggtgagagcgtgccttttgtagaatgaaccggcgagttacgatatgatgcgaggttaagttgaagagacggagccgtagggaaaccgagtctgaatagggcgcaatagtattatgtcgtagacccgaaaccatgtgacctacccatgagcaggttgaaggtgaggtaaaactcactggaggaccgaaccagggcacgttgaaaagtgcttggatgacttgtgggtagcggagaaattccaaacgaacttggagatagctggttctctccgaaatagctttagggctagcgtcgacattaagattcttggaggtagagcactgtttgggtgaggggtccatcccggattaccaatctcagataaactccgaatgccaaagaattatggtcggcagtcagactgcgagtgctaagatccgtagtcgaaagggaaacagcccagaccaccagctaaggtcccaaaataattgttaagtggaaaaggatgtggggttgcacagacaactaggatgttagcttagaagcagctattcattcaaagagtgcgtaatagctcactagtcgagtgaccctgcgccgaaaatgtaccggggctaaaacaatttaccgaagctgtggatacctttataggtatggtaggagagcgttctatgtgtggagaaggtgtaccgtgaggagcgctggaacgcatagaagtgagaatgccggtatgagtagcgaaagacaggtgagaatcctgtccaccgtaagactaaggtttccaggggaaggctcgtccgccctgggttagtcgggacctaaggagagaccgaaaggtgtatccgatggacaacaggttgatattcctgtactagagtatgtagtgaaggagggacgcagtaggctaactaaagcgtgcgactggaagtgcacgtctaagcagtgaggtgtgaattgagttaaatgcttaattctgtaacattgagctgtgatggggagcgaagattagtagcgaagttagtgacgtcacactgccaagaaaagcttctagcgttaatcatactctacccgtaccgcaaaccgacacaggtagtcgaggcgagtagcctcaggtgagcgagagaactctcgttaaggaactcggcaaaatgaccccgtaacttcgggagaaggggtgctggctttgagtcagccgcagtgaataggcccaagcaactgtttatcaaaaacacagctctctgctaaatcgtaagatgatgtatagggggtgacgcctgcccggtgctggaaggttaagaggagtgcttagcgtaagcgaaggtatgaattgaagccccagtaaacggcggccgtaactataacggtcctaaggtagcgaaattccttgtcgggtaagttccgacccgcacgaaaggcgtaatgatttgggcactgtctcaacgagagactcggtgaaattttagtacctgtgaagatgcaggttacccgcgacaggacggaaagaccccatggagctttactgcagtttgatattgagtgtctgtgccacatgtacaggataggtaggagccatagagatcgggacgccagtttcgatggaggcgttgttgggatactacccttgtgttatggccactctaacccggtaggtttatcatctacggagacagtgtctgacgggcagtttgactggggcggtcgcctcctaaaaggtaacggaggcgcccaaaggttccctcagaatggttggaaatcattcgtagagtgtaaaggtataagggagcttgactgcgagagctacaactcgagcagggacgaaagtcgggcttagtgatccggtggttccgtatggaagggccatcgctcaacggataaaagctaccctggggataacaggcttatctcccccaagagttcacatcgacggggaggtttggcacctcgatgtcggctcgtcgcatcctggggctgtagtcggtcccaagggttgggctgttcgcccattaaagcggcacgcgagctgggttcagaacgtcgtgagacagttcggtccctatccgtcgcgggcgtaggaaatttgagaggatctgctcctagtacgagaggaccagagtggacttaccgctggtgtaccagttgtctcgccagaggcatcgctgggtagctatgtagggaagggataaacgctgaaagcatctaagtgtgaaacccacctcaagatgagatttcccataactatatgttagtaagagccctgagagaagatcaggtagataggttaggagtggaagttgtgtgagcaatggagcggactaatactaatagctcgaggacttatccaaagagtcgaaagatattgacaacgtaagtttaacttgttaaaatatagatattcaattttgaatgtttaaacattcagagttaagtgacgatagcctaggagatacacctgtacccatgccgaacacagcagttaagccctagaacgccggaagtagttgggggttgccccctgtgagataaggaagtcgcttagcaagagattgagcctagatgatctaggctcatttgggagtttagcttagttggaattgagaggcaatcgagattccaatcggcggataagagaaacgcagtttctcaccgttggctgagttaaacgaccatttgggagtttagctcagctgggagagcatctgccttacaagcagagggtcagcggttcgatcccgttaactcccatttaagcgggtgtagtttagtggtaaaactacagccttccaagctgttgtcgcgagttcgattctcgtcacccgctttgaacagttgttcattttaccaagttgtttaacttgggcgcgtagctcaggtggttagagcgcacgcctgataagcgtgaggtcggtggttcgagtccactcgtgcccattaatagtatggtccgttggtcaaggggttaagacaccgccttttcacggcggtaacacgggttcgaatcccgtacggactatatttttggaggattacccaagtccggctgaagggaacggtcttgaaaaccgtcaggcgtgtaaaagcgtgcgtgggttcgaatcccacatcctcctttttaattaacgcgggatggagcagctcggtagctcgtcgggctcataacccgaaggtcgtaggttcaaatcctgctcccgcaatttggctcggtagctcagttggtagagcaatggattgaagctccatgtgtcggcggttcgattccgtctcgcgccatcaattcaataattcggaagggtagcgaagaggctaaacgcggcggactgtaaatccgctccttcgggttcgggggttcgaatccctccccttccatcctttacgggcatagtttaaaggtagaactaaggtctccaaaaccttcagtgtgggttcaattcctactgcccgtgttaataattatggcgggtgtggtgaagtggttaacacaccagattgtggctctggcatgcgtgggttcgatccccatcactcgcctatttattatttgtattattggggtatagccaagcggtaaggcaagggactttgactccctcatgcgttggttcgaatccagctaccccagtttaatttatgccggcgtggcggaattggcagacgcgctggactcaaaatccagtgtccgcaaggacgtgccggttcgaccccggccgccggtatagtattaaagacaaggttttcggaccttgtctttttcttttgttcgttgaatttttgatgctgagttactaaaaattactaattctataacaaatcatctaatttatccgctaatttttgttgtttacttggatataaatgagagtaagtatctattgttgttgttatagatgcatgacctaatctttcttttacaacaagataatcttctccttgatttattagtagtgaagcatgtgaatgcctgaagtcatgaattcttattttttttagagtattatctctttgtaatatctttttatattgcttctcgattgaatctttagttatcgtaattgggctattttgaaatatctgtagatcatctaagctgcttgtaaattcttttaatttttcatgctgtgtttgcttccattcttctaatgtttcaactagtttattattcatgattattcttcgggttccagcctttgtctttgtaccactaatatgttcttcaccttttttgacgtatacagatttacttacatgaattgtatttgtagaaaactctatatctttccacgttagagcaagagcttctccgagtcttagaccagtaaagaatagaacagtgaatagtaactttatattgtattcatcgtcgttaaatagtgttaagaagtgcttgaattcttttactgtccagaagtttaattttgctttttctattggcaatttttttagcaatcctgcagggtgttccttgtaaaatccctttcttaatccaacatccaaaattttctttagtaaaattataattttattaatagtatttggacttagcttcttttccgagttttgagcatttttatttcttaaatgttctctgaattgatagatatcttcataagttaatttagatacatcatcaactttttcaaaatagctttttatatgcctgttataattgttttcttgtgtatctatataactttgttttctgttgtttattttgtcttcttcttttaagagatcataaaggatatcaattgatatttttgagttgaaacttttttctttaagttctacacttcgtaagtattgttcggcttccaatgcttcttttttagttttaaatccttttcttacaattctgcgttgttttaaagatattggatttataccattggaaacatcgacaatccaagatccgtctctacttttacgtaaagccataagttacgcttctttctggagttcaattcctaatagctcttcagcaacactggctggaattgtaccaatccgtttgttatcgtagatgttaaaaccacgattcactaatagtaatttgccggtatgaataatctttcttgcagttcctggagcaaatccaagttcgataaggtcatcttttgttacagttttaatcatgtgatctccttttctaaatagattaagtaaggggaggattaactccccttgtattgtacttatttttgttttacatctactaaatggatagcatccgccttgtaatacattgtcgtgctaatcatagtagcttgtaaattgtcaaatgtaactggcacttcatccattgcttggatatagtcattatcaaccaaggcatctggattgtctactgagacttgggttgatttctttttgaattgtccatctttgatcgttacattgtatttccaaccaatgattttattggtattaaaacgtctttcgctaccatctcggtttttgataatttctccgtttgcatctgctcgaacttccgtttcaaattttggaataacttcatccaattcaaattttgttccaatgttattaaaattccagtcattttgtgaaagcatttttgccatagttaatttctccttttgatattttctttgattgtggggatcaaatcctctcttttaaagagtattgccctttctattaatccacttgctaaatctggtggatattccatattgttgagtgcgagatagttagatttctcatactcatgcaataaattattgtcgtatagaaatttatacgcttttagaatagctcctgaacctttataggtaaaccattctaatttttgttccagttctgtttttggttttgaaataatgatagagacaggtcttgagtgtcctaaaaacttttcccaagatctcaaaggttttgagaagtgactatcactatagaacctcactttttctttgagatatcccttggtaaagttaagaaggtctatttctgaatgcaaccattcttgaatgaagtagtgagctttttctttcctaagttctaactcagttcttatccaattttctatataccgcttgctgataccgagcttctcagcttgttctaagcgcttatcatatattctaagtctttcatcatcattgggttttcttaaatataaggtctgaccgattgtttcatctccgtaggtattgtagtaggtgctttttccatatataaagcgtttcttctgacaaatctttagaagttgattaggagtgaaatagggtgtttcattaaaatcatctattgcaatatcaattcgtctgattgaaaaatgattgtaattgtagtagaggttgtccagaaactgtctttcggatagattatttggatctaataccatatctctatagaattcaagtgcctgtcctgacatgacaagcatgtaggacgactctttcgatccatagtagatacggatattcccataatgaagctggctatcatagttatagtatttaaggctccccttattctcaataaataggtcaaagtcaagaaataggatatcttcgattatttcttttggcgaaaattcagtcttatcaaactgaatttgaatccagtcaaatacagaacgtaaatgctcatttttggccatagattttgattcaactttttgcctaattttgccacccttaaaatcttcaaaacccttggtaatactgaattttttcgatggtacacctaacttgcagggggtggtgttactacacaccctatcggtcaaaaatggtccgtccgcatctacgctcattttcggctttctgcctcatggctcagccgaaaactcgctattagccgaacctattttttgacctcttgttaacaaaccctagtaagccggtttgcatcgactcttcaatatcttggattttcttttttaggttggaattctcaatttttatcagtcgcatttctcgcttaaattcctgttttaaggcgatcagttcatcgtagagctcatctattacttggtttagggattcatgctcattgtctgctagactcccaaatacggcttgtatagcctcttttagacctatttcaagttttagtttagctaacttttgaaattgtctaaggtcttcgtctgtaaagtcataggtaactgtataacttaattgatgagttctgggatttctactgataggaattttaatttttttaaattccttgccacttatctctttaatcagttggatccaatttttaagagtagaggtagagttcaggccagaaatttgattgactaactctttattggtcatctttttgtgaaacctccgaaattttcttgtgcaactgaagagttttctgtggtataattgttacataatatgttttgatcttggaacgaacggcacatttgtttcaagatttttttatattgtcgaatcttacctcctttattaaaatttttaaaatcgactactagttacatacacttttacctccttttatgctataatattctcaatggaatatttaatcttaaaataaatattccttatggaataattccattttataccgtttagaatattttgtcaagtcaaaatataccaaatcgaatatttaagaggatacaatgtttaataatgattcttttggagatcgtcttaaggaactgagaaagagtaagaagttaactcaagtacaggtttctgagatgattggtgtacaacaaggtacttattctcgttgggagaatggaactttagagcctaatttagaagccgttgtcaaattagcgaagttgtttgatacaacgacagattatttattaggaaaaacaatttacagtactctagatgttattcctcatccaattactagaattgatatgaagaagttaaaagagtttaataaaacggaactaaatgatctgaaatttgcgattgttatgaatggaataaaaaatcatttcactgtatttgactatatggatgagctagtctctgaatataatttagatgaagaagagcaagaaatattgcataccctttttaaagaggtttatgattattttaatgcggattgatgttttatggctttctcacttttcaggaagaagtagagaatacgtacatgtagaaaagttatgtaatttagataagctagttcattcaaacttacctaaattacaaaaaaaatcaaattcccaaaattccaacattaattatacgacctagaaaggagataaaaaagtggacaaacaaaccattttttactgctatagaatgactcatgattatggtatcaatccttgtgtttttacagaaaattatgatacaacacctcatcttcttactgaaggagggtgtatgcttcagttaagaaggaatattaaaaagaactgggctgataaaataaactcgaagtctgtagatgcttacataatggctgtagcagggcattcaaacgatgggaaacaatggagagatgagcaaggaatgtttatcactccaaaatataatcatctaatttttgttgctaaaattagtgaaattttaacaatgaaagaatatttactatctccaaaatctaataatagaagagatgcttatacttatcaatggctgattgaaaagaatggattaaaccaatcaagttttatgaatgaagtagtgattcttgcagaccgttttaattattttggtaagtctccacttaaaattcccaaagaaattttagatttttttccgatgggagaacgagcgagaataaatggaaaaccattcccaagatggaatgccaaaaatggattttataactcggaagagagatttactgatgtattagaattaaaggaatttgctgagactatacttggttcacaaaacaaagtaatggatttgccttatcacccattctttatacgaggaaaagaattttgaaaataattttatcaagaaaaggatttgattcatctaatggtggtatccctagtcctatactacctgatgggaccctactttcattaccaatacctgctaaattggacactatatcttttgacgatttaaactataatggggtattatattcagatatattaaaacaattgaaagggaaggaagataaaacaaaccattttaattgtcatcttgacccggacataagagaaaatattaggaataattctgtttctaattggagaccagcatttggccaaatcaaaagttctcagggaatattacgaaatcataatgtttctatcggtgacctttttctattttttggatggtttagacaaactgaaggagatattcacgatggaacattgcgttttaagaaaaatgctcctgatttaaatatcatttatggttatttgcaaattggtgacatgacgaatgataaagaatgtttgcagaatatgtatccatttcatcctcattctttagaacatatgagtagtttgaaatctaatatgctatatataccgagtgaaaacttatcgtttttacctcaaaaaaaaggctatggtacttttaattttcatgatggtagagtattaacaatgagtggtaaatcaagaagcatctggaaagaaataccggcacttatgcctgagaatataaatggtaatcataaaaattctgctaaagattgtggtttaaaatattctggtatatggcaagaaaaagttttgttagaaaacgaactatcaaattcttgggctaaagagttatttatgttaaaataataaaaaacacttatcctaattaaaagagaaaataaaatgattacattaactgttgaaaaagattggactgggaaatacacgtttatagtttcgaatggatttgatagtcaaagtttgacaccaggaacatttgtttcagattttcaaattgaccaagctaaacaaaacattcggtatgccggaagtattgatgatggtattagagtagtaaaaaatgctttaggaattatttaaaataaaatattggagtcatttatacaaaaactagacctaatttatatttagtttgttaatctttcatatacctcaaataatcgtgcaactgtctcgaatatctgtagttgaatataacctattgggacacatcgtctattctctgatgacgctcttgggagataaggtatggagtgttacctaaaagttactgaaatttgaaaaattggtctattttgtgaaaactaaagactttaaaaccttattaaatcaaggtttagatattcaaaaagtgtaaacatggaactcaaaatccagtgtccgcaaggacgtgccggttcgaccccggccgccggtatagattaaaagacaagatttttcaatcttgtcttttttgttttcaaattactttttatttcattttcaataagtgtgttctttttggagtattctatagattcgaggtaacattatcatggtatagatcaggagagaaattcctccaaatattaatatcagacctccgtttatttctttttgaaatagataagtaaatacaatggtacctatcggcatgatagacgtatttagtgtgaacaaagtactcattactcttcctaaataatttgtttcaatactactttgaagataggtcatgacgacaatatttagaataacaagagtgaatgcgataattcccataaataaaccgccaacggaagaaataatcacttgggtgttagtagtttcaaatgtagtacccaaaccaacgatagcgatggttagaagaaaaagtggaatgcgaattctattagagagaagtgtgttattttcttttttgtctggcaatagtgacatagacacactggctaataacattccaaccgcagacattgtttctaggatacctactgttgtattatctaataagagttgctctttgactacaaatggtactccgatggtaatggaagtatagaaaaaattcagtacaacactaacaagaataatatatttgacaatctgattttcttttaagaagtggataatttctttgactccgtgttgatgcttttcattctgtttaatcttagcttcttgctcttcgtgttcatagaagaatttcatggtaagtaagacacctaaagaaaggagatttccaatgatttctataagaataaagcctgagaagcctaaccaattataaagaatgactccaattgctggggaaagcatggttgcgatagcaatggcggtttgtgtaacagaacttaatcgttgaatttttttatcgtttactaactcgtggatagaggctgaataacaagtatcattgatgttaactgtaattgagtggagtatgacaaacgggattacgaggtataagatagtagatgaattcgttaaaaaataaagagcataaaacagaagaaagattataagcctaaagataaaattataaattaagatctttttatgacggtatcggtctactaaattaccgattggaaccaagaaaatcaaactaactaaaggatagatgatcatattgattccaaaactcattgccgattttgtttggtccagtaacattaatcctaaagcgaaattaaaagcttttccacttaaagaactaatcaaactactaataaagtctttgatgatttgtctattagacatttgatcacttattaaattcttaatattaatcccctccattcgtgtcaacattgcttcggttatctaatcctattcaatcaacctgtgttgtaaggtaattggaatattagataaaccataatttttgttaattaagattttatcaattatactaataaaagtatattaaaaaatgtaaaaaatattgtatttatgtttactcattatatttctctcttgctttgacattatctaaattgataacttcatacgtacctcttctgaaataggatatattttacaatcgttaaaggatttcaaaatgaaacagattgatttattttgatttttataggctttaaatttattccagatgtctatactatttgttataacatttgacaccgctttcaaacaggagtacaataatattgaggacaagatggtttatctcttttatttaggaggtgtcagatatgcaaatctattttgtttattctattttctatctattatcacgcgtagtagcacttgtagttctagcttatcttattaagttactcattgctcgtttaaaaagaaactaagtaacattttgcccaaatagtagttatttaggctttttgctatactttagcctagtggattaaatctataaaggtagtgttcagcatcttcttgtagagtgattttattttatgaagattgtttatagttgaagggggaaatagatggtctctaaaatcgatgtagcttgggacttgttcctagaaggaaatatattagaagctaaaaagttggttgaacaagatttttccattgatacctgtacagattttagccttttaaatctgatggggtatttattattggcagaaaaagactatgcctcgtgtacccgtatatttgagaaatacattttattagctcaacaaaatgaagataaagaacatgaacacattggattacatcaattagcgatgatctacagagatcagggtgattttcataaggctttaaagctcattgaagatgaagagaagataattgaagagcattttcccaatgataatctaaagaaagctataaataactacgaacaaggctatgtgagattgaaattaaacaatcttgatgaagctcttacattcatgaatctgtcactggaacaatctttagagactgatgatgtgatttctcaggcttgtagctatagagggttaggggaaatttatttagccttggaagataaaggattagccaacacacatttcaaacgagctatagaacttttcgaaagtgttggagagtttgaaggggtaaaggaaattgaggaattgattaatcgatgattttgcatttagattttgtcattagtttgcttaaataaaaagttttaatatgctataaatcatgtatttgattaagggagataagatgagaggttatgatagagatggaatttctatttattttaattatttttataccttatttcttttatttagaatggaaggataaccctaaacaaaaaataagtccttttgttatctttataagttttacatgatttacttgtggtttatcctcataatttccataatggctatcggtattttttcccttggagtactagctgttagaggcgaaaaacttacgtctggtttctttgttttatcttttttaggtgtagttctatttagtttctatatttttagtattctaaaagagataaaggacttaaagcaaataaaaggtaagtaaatagatagacgtaatcttacttgaattgtctttatctggggtatgagtctgtgtctttaacggagttcccaaaaagttacagaaatttgaaaaatgagtctattttgcgaggttcaaaagttccaaaaccttattaaatctaggttataagtttcaaaaaatgtattcatggaactaaaacttcagtgtccattaggatgtgccggttcgccccggctgtctctagagattataaagaagttttactctttttttgttttaattttatcttttttgtgatataattaaccggtaaagtttctgctagtgaattagaaggagtttattttgtctgaagttgcaaataaaatcgatcgatttttaaattctattttattattatctgagaatcagcatgagattttagttggttcttgcacaagtggtgtttcattaaccaacactcaggaacatatcctgatgttagttgctgatgaagctctaaccaattctgtcttagctaagaaattgaatgttagtcaggcagcgatcacgaaggctgtgaagcccttattgagtcaggggatgctggagacttatcgcgatgaaaatgatgctcgggttctctattatcgcttaactgaaattggtaagccgattgcattagagcatcagcaccaccatcagcatacccttcacacttatgaggatgttttgtcgaagtttactaagaatgagcaaggggtcatttcgcggtttttagatttattggaagaggagttatagtttgaggtatattacggtttcaaatttatcgttctattatgatcgagaaccggttctggaaggaatcaattactacttagatagtggagaatttgttacgctgactggtgagaatggagctgctaagtcaaccttgattaaggctagtcttgggattttacaacccaaggtcgggactgttgagatttcaaagacgaatgtcaagggaaagaagttaaggattgcttatttaccacaacagattgctagttttaatgcagggtttccaagtacggtctatgaatttgtgaagtcaggtcggtatcctcgtaaaggctggtttcgaaagttgaatgagcacgatgaaaaacatattctgaagagtttagaatctgttggaatgctggaattcaaggatcgggcgattggttctttgtctggtggtcagaaacagcgggctgtcattgctcggatgtttgcttcagatccggatatctttgttttagatgaaccgacgacagggatggatgcgacgacaaagagtgatttttatgagttaatgcatcacagtgcgcatcaccatcaaaaatctgttttgatgattacgcatgatcctgaagaggttaatcaatttgcggatcggaatattcatttggttcgtgaccaaagctctccttggagatgttttaatgtccatgataatgaaggggagggtgaccatgcttgatttattccagtatgattttatgcaacgggccttgttggctatggttgccatgagtcttttttctcctgtattagggattttcttaattttaagacggcagagtctgatgagtgatacgctgagtcacgtttctcttgcgggtgtcgcttttgggcttttccttggaatctctccaacgctctcgactatgatcattgtcattatagctgcggtctttcttgagtatctgcggaccttatttaaggactttatggagatcgggacggctattttaatgtccactggtcttgccctagctttggtactgatgcgtggtggtgggaaaagctccatgagcttggatcagtatttgtttggttctaccctaaccattacggatgaacaggtgatcgccttatttgtgattgctttcgttgtattagtgttaacggccttattcttgcggcctatgtatatcttgacttttgatgaagatacggcctttgtagatggccttccggttaggaccatgtctatcttatttaatgtggtgacaggggttgctatcgccttaatgattcctgcagcaggatcgttattggtttcaaccatcatggtcttaccggctagtattgcgctgaaattagggaagaacttccgtggggtcatgctgattgcggttatcattggttttatcgggatgtttagtgggttgattttgtcttatattgcagatacaccggcgagtgccagcatcacgcttttatttgtggccttgttcttgcttgtgaatcttggatcacgtttgaggaagtagatatgaactttaaaaaatttggttggttattgttagtggctttgacccttgttttgacagcttgtggcaaaagtcagagtcaaaatgggaaattaaaagtgatgaccactttctatcctgtttatgattttacaaaaaatattgtcggagatgaaggaacggtagacctgctcattggagcgggatcagagcctcatgaatatgaattgtctgctaaggggcgggctatgattcaagattcggatgttttcgtctatgagaatgaaaacatggaaacgtgggttccaaatcttttgaaatcaatgaaggataagaaaaccaaagtgatcgatgctaccaagggcatggtcttgcttcctggattggaagaggaacatgaacacgaagggggcgaagaacaccatcatgaatatgatcctcacctttggctctctccccatcgtgccatgaagatggtagagttgattcgtgatcagttggtggcagcttatccagataagaaaaagacgtttgagaaaaatgcccaagcctatctgaagaaattacaggccttggatcaagcttatcaggatgggttgaaagatgcgaaacaaaagaatttcgtgacccaacacgcggctttccgttacttggccttggattatggcttaaaccaggtggccatttcagggatttcgcctgatagtgagccttctgctgcacgattgcgtgaattgacagagtatatcaagaaaaatgagatcaaggtcatttactttgaggaaaatgcttctaagtccttggcgaaaaccttgtcttctgaagctggtgttgagttggctgtcttaaatcctttggaaagcttgacggatcaagaaatgaaagatggcgaagactacgtgtctgttatgaaggagaatctgaaggcgctagagaaaacaacgtcacaagctggtaaggatattcaaccggaacatgaggaagatgctaagacagttcaaaagggctatttcgaggatagtcaagtgaaggatcgtagtttggcaaattatgcgggtgattggaaatcagtttatccatacttgcaagatggaacattggatcaggtctttgattataaggcaaaattaaatccaaccatgacggctgctgagtataaggaatattatacaaagggttaccaaacagatattgatcggattaagattgataaggattcaatggagttttatcaaaaaggatcttctaagaaatatacctataaatacgtaggtaagcacattttgacttataagaaggggaatcgtggtgttcgttatctctttgaagcgaaagagagcgatgcgggagacttcaaatatgttcaatttagtgaccatgaaattactccggtaaaggcagctcacttccacattttccatggaggaaagagtcaagaggcgctttatgatgagttggaaaattggccaacttattatccttccaacttatctggtttagaagtggcacaggaaatgctggctcattaagagctgtatcaaaagagagactaggactgattatcccggtctctttttgattaaaaatgaggagtgaagcttgtcaaatgcttgaaaatacgttacaatgaaagggctttaaactaaaaaatgtatgaggaattttaaatgaaaaaagttggtgcaattcttgtgagtcttctcagtgtggtcctgttgatagcttgttcgcaacagggagcgagcaaaaaatcaaccgcttcctctagtcaaacgacgacctcttctgaagtcaaaaagacggatgcttctagttcggaagtgaaggagaaagaaaaaaaagaagagaaaaaagaagtgaagaaaatggatcttgaagcgattgccaatggagattacagcagtattgctggggtctggcaagatgataaaggaaataagctggtctttaacgacaaagggttggtatcacaagagttagagggctacggagcttctttgacagattatgggacagcctcagaaggtatctatggtggtcgtgatggaggcttcttgttggagtatattcctgcgggagtgcccattggtgatcaggttgatgatcaaggacaagtcgtctttaaggacacatcagatgcctctaaaaatcgcttgtggtctggtgttggtatcgctagttttggggaacaaggctcgatctactatcatgtaggagatgaataacggaaaaaagaggctgggacaaaagtcctagcctctcaattatttttggattgtcaagcaagacgcagtggttgagtgggctctactacgctgatttcatcagcttatacagccctactcaactgtgcggaggtgggacgacgaaatcgaattctaacgaattaccgatttctgtcccactctctttttcttatgcatgtggtgggagccaagaaagctcaaattggagcaattgggcttcaaggagatcttgatgggaaacctcttgtttctctttgccgtctaatagggccttttggatgaaataggcacctgcagtgtgtgagttggcgcaaatcttgagctcttgcttgggaagatggagaaggacttctttaaagagggggaggcccagatcatagattggttttcctgggcaggttggatagagtccaagggctgaccagatgtaccaagcagataggctaccgttgtcttcatcacctggataggcttggaaatcttgatgaaaagcttgggaacggatctggtggatcaggagattggtgtattcgggatgaagactgtgacggaagaggtagggaatgtgaaagctgggttgattggagatggcgatctgcccaaatggggcttgggccatttcactcatttcgtggatttcatagccatatcctcttacgtcaaattgaggtttttgattggccagatccagcagtcgttgggtgaaggcttttttaccgcccattagctctatcaggccggagaggtcgtgtaagactccaaaagtagcctgggtggcagaacattctgcataatctcctccccagctggtaggagagaagggttctttaaaggttccattggtggatcgtgctctcataaagcccgtttgggcatcatacaatgttcggtaggagaggctggaagcggcatatcgagcggctgtttctgtatgccccaattgcttggcaacggtagcaatgcaaaaatcactataggcataatctaggctgtggctcacactttcgtgaaaatcatcgggtaggtagccaagggctttgtagctttcattgccatggcgaccaaaatgttgagtgggatctgttttttgagccgtttggagcatagctgtcagcatgttttcatgtaggtctggtgcgatcccttttgtgacagcatccgcaaagaccccatcgatgagggtacctggcatcatccctcgttcatctggggccaaccattttggtagaaaaccagtatcctggtaagtatttaaaaatccttcgagaaagtgacggtagtaatcgggatagacaaggctaaagagcggaaaagaggtccgaaagagatcccaaaatccgatattggtataagcttttcctggtttgatttcattatgggtgacatccaggtgccagtcatttcccgtgctatctgtttcataaaaggtttgagggaaaaggaggagtcggtaaaggcaatgatcgaaaaaggcttggtcacgccctccggcatcttttacttcaattcgttttagcagttgattccattgatcggctgcttcttttttagcttcctctagggaaaggttgggaagatggctgtgagccatgtcttgggaaagataagagctacctaattggacggtcacttcattgctagaaaaggtgagaaaaagatcttgatcgatgtgagtgacattttcgatcggctggctaaattgccactggagatagaaagagtaggaagtatctgaggtatgggcctgatccagaatgcggaagtggcaggtttggtctgtcagggtcaagtcctctagttcctttgctgcatgaaagcagagtgtcagcttttctggtgctcgaaagcgcatgacagccccgtagcagcttggaaccagctcgctttgaatctgataacgttccgaaaaaattcgaaggtagtggggctggaaaatagcttctttcatcgaataactgctttggagacggaagaggtcggaacttgcaatatctcctgtgatgggcgtgatgaggcaccaagtgtagtctcctatccaaggactaggctggtgagtgagacgaaatccctgaaaaatagggagattggggttgaaaaaccaagccccctgttcatgtgtcgtctggggaaggaagtagttcatcccaaaagggactccggtataaggaagggtatttccgcgggaatagtggggatgattatcgcttccccaacgggtatcgatggtctggcaatgtgtgcgcatcttgtctcctttttcttcatcaacgttaaatgatctttgtttttctttgaacacgcagtggtattttcttcaattgtatcaaagcgttgtcaaatatgatagcgtttttatcaaatggaaaattttgtagaaaaagggctatagtttgcgtatgtatttcccctttgaaatcttttatactgaataggaaagaatcgatacgtgtgaggaaaataaatgacctattcaaaagaaattgtgcgagaatggttggatcaggtggctgagcgagctaaggagtaccctgagtgggtggatgtctttgaacgttgctatacagacaccttggacaatacagttgagatcttagaagacggctcaacctttgtgttaacaggggatatcccagctatgtggttgcgtgactcaacggctcaattgaggccttatcttcatgtggctaaaagagatccccaattgcgccagaccattgctggtttggtcaaacgtcagatgaccttgattctcaaggatccttatgccaactcttttaatattgaggagaactggaagggtcaccacgagaccgaccataccgatttgaatggctggatttgggagcgcaagtatgaagtggattcgctttgctatcccttgcaactggcttatcttctttggaaggaaactggtgagactagccaatttgatgaaacctttgtcacagcgaccaaggaaattcttcatctctggacagtggaacaagaccataacaactctccttatcgctttgttcgggatacagaccgtaaggaagacacgctggtgaatgatggttttgggccagatttcgccgtgacagggatgacctggtcagcctttcgtccaagtgatgactgctgtcagtatagttacttgattccgtccaatatgtttgcagtggttgttttgggttatgtacaagaaatcttcgcagacttgaatctagccgatagtgaaagcatcattgcagatgccaaacgcctgcaagcggagattcaagaagggatcgaaaactacgcctacacgactaacagcaagggcgagaagatctatgcttttgaagtagacggtttgggaaatgctagcatcatggatgatccaaacgtgccaagcttgttggcagctccttatctgggctactgcgccattgacgatgaggtctaccaagctactcgtcggacgattttgagccctgaaaatccctacttctatgaagggaagtacgcaagtggactaggaagttctcatacgttttatcgctatatctggccgattgctttatccattcaaggattgacaacgacagataaagctgagaaaaaacatttgctggaccagttggttgcctgcgatggaggcacgggcgtcatgcacgaaagtttccatgtagatgatccaactaaatactcgcgtgaatggttctcttgggccaacatgatgttctgcgaattggtcttggattacttggatattcgctaatgagctgtcgcttaacagattcttgtaaagaatcacaaatagatctttaaatttaagttagaatgaggttttactcatggaaaatgttgttgtacatatcatctctcatagccactgggatcgtgagtggtatctaccttttgaaagccaccggatgcaattggtggaactgtttgacaatctctttgatctttttgaaaatgaccctgaattcaaaagtttccacttggatggacaaaccattgtccttgacgactatttagaaattcgccctgaaaaccgtgacaaggtgcaacgctatatcgacgagggcaagctcaagattggtcccttctacatcttgcaggatgattacctgatctccagcgaagccaatgtccgcaataccttgatcggacaggctgaatgcgctaaatggggcaaatctactcagattggttatttcccggatacatttggaaatatgggacaagctcctcaaatccttcaaaaatcaggcattcacgtagcagcttttgggcgtggtgtcaaaccaatcggctttgacaaccaagtcctcgaagatgagcaatttacctctcaattttctgaaatgtactggcaaggggcggatggtagccgtgtgctgggtattctctttgccaactggtacagtaacgggaacgaaattccagtggataaagatgaagctttggctttctggaaacaaaaattggcagatgttcgcgactatgcctcaaccaaccaatggttgatgatgaacggctgcgaccaccaaccggttcaacgaaacttgagtgaagctattcgcgtggctaacgaacttttccctgacgtgacctttattcatagctcctttgatgaatatgttcaagcagtggaaagtgcgcttcctgaacaattatctacggttacgggagaattgaccagtcaggaaaccgatggttggtacacactggcaaatacgtcttcctctcggatttatctcaagcaagccttccaagagaatagcaacttgctcgagcaagtggtggaacctttgaccatcattactggtgggcataaccataaggatcaattgacctatgcctggaagacactcttacaaaatgcgccacacgatagtatttgtggatgtagcgtagatgatgttcaccgtgaaatggaagttcgttttgccaaggtcaaccaagttggaaactttgtcaagactaaccttctgaacgaatggaagggtaaactagcaactcaaaaagcccagagtgagcacctctttacggtcatcaatactggcttacataataaggtggataccgttagcacgattgtcgatgtagcagtttgtccatttaaggaattgcacccgacagagggcttcaagaaaatggccactttgagcttgccagactaccacgtagaagatttagatgggcatcttgtagaagcagagattgaagacttgggggcaagctttggctataccctgcctaaggataaattccgccaaccctatattgcgcgtcaagtgcgcgtgacggttccagttcatttggtagccttgtcttggacaaccttccagctcttagaaggcaaagcacctcatcatgatggtctgttccaaaatggggtgatcgatacgccatttgtaacccttagtatcgatgatggcttgaccctctatgataaaacgaccaatgaggcttatgaggatttccttcgctttgaagatcgtggggatattggaaatgaatatatctacttccaaccaaaaggaacagagccgatctatgcggagttaacagcttatgatgtcttggaaaacaatgctcgctatgccaaaatcttgctcaagcatgacttgacgatcccggtcagcgcggatgaacaattggatgcggagcaaagaggcattatcgagtttatgaaccgcaaggcaagtcgctcagaagagctgacaaccatccctcttgaaacggagatgaccatctttgtagatgatccgcaaattcgcttcaagacgcgcttcaccaatactgccaaggatcaccgtatccgtctcctggtcaagactcacaatacacgtccaagcaatgattctgaaagtatctatgaggtggtcacacggccaaataaaccggctgcttcttgggaaaatcctgaaaatccccaacaccaacaagccttcgtcagcttgtatgatgacgtcaaaggggtaacagtggccaataaaggattacatgaatacgaaatccttggagacgatacgatagctgtaacccttctccgtgcttccggtgaacttggtgactggggctatttcccaacaccagaagcacaatgtttgcgggactttgaggttgaatatgcagtagaatgccatcaagctcaggggcgcttctccgcttatcgccgagcgaaagctttgcagacaccgatgaccagccttcaagttgaaaaacaagaaggaagtgtagcagcgtctggtagcttactcaagcatacagccttgacacatcctcaggtttgtccaacagcctttaaggtagcggaaaatgaagaaggttacatccttcgctattacaacatgagccaagaaaatgtgcgcgtgtcagaaggacaacaaacggttgtcgatcttctggaacaaccgtatccggttcatacaggtttattggcaccgcaagaaatccggacagaatggattaaaaaagaagtatagctgtttgcagctgaagaaacaataaaaggaaaggaggagcgaaaaaagtaaggaccgactgctgactcgctcctttttacaggtaaaagcaatgaccattgcaacgattgatatcggagggactgggattaagtttgctagtctcactccggatggaaagattttagataaggccagcaccccaacgccaaaaactctagaagatttgttggtttggttggatcaacgcttgtcagaacaggattacagcgggattgccatgagtgtgccaggtgccgttcatcaagaaaccggggtgattaaggggatcagtgccattccttatatccatggtttttcatggtatgaggcgctttctcatcataagctccctgtccatctagaaaatgatgccaactgtgttggactgagtgaattgctggcgcatcctgagattgaaaatgcagcctgtgtcgtggttggtacagggatcggtggcgccatgattatcaatggcaagcttcaccgaggtcgccatggactgggcggtgagtttggctacatgaccaccatcgagcctgcagaaaaactcaacaactggtcacaactcgcttctacgggaagtatggtgcgctacgtcattgaaaaatctggtcagtctgactgggatggacgaaagatttaccaagaggctgcagcaggcaatgccctttgccaagaagccattgagcgcatgaatcgtaaccttgctcaagggctgctcaatatccagtacctaatcgacccagatgtgattagcctaggtggctctatcagtcagaatccagattttatcaaaggggttcaaaaagcagtagacgcttttgtggacagatatgaagaatatactatcgctccagtgattcaagcttgcacctatcaggcagatgccaatctctacggtgcccttgtcaactggttacaggaggaaaaccaatggtaagttttacaggacttagtcccaaacaagcgcaagctatcgaagtattaaacaatcacatttctctaccagatgtagaagtgtcggttgctcagtctgaccaagcttctatctctatcaagggtgagaatgggcagtatcaactgacctaccgtaaacctcatcaactctaccgtgccttgtctgtgctagcaacagctttagcagaaggggacaaggtagagattgaagaacaggctgcttacgaagatttagcctatatggcagactgttcgcgcaatgccgtgctcaatgtcgcatctgccaagcagatgattgaagtcttggctctcatgggttactcaacttttgagctctacatggaagacacttatcaaattgaaggacaaccttactttggttatttccgtggagcatactcagctgaagagttacaggaaatcgaaagctacgcccagcagtttgacatgacctttgtgccatgtatccaaactttggctcacttatcagcctttgtcaaatggggcgtcaaagaagtgcaagagctccgcgatgtagaagatattcttctcatcggtgaagaaaaagtttacgacctgattgacggtatgtttgcgacgttgtctaaactacaaactcgcaaggtcaatatcgggatggacgaagcccacctggttggtttgggacgctaccttatcctaaatggtgtggtggatcgtagcctcctcatgtgtcaacacttggagcgcgtgctggatattgccgataagtatggtttccactgccagatgtggagcgatatgttcttcaaactcatgtcagcagatggccagtacgaccgtgatgtcgaaattccagaagaaactcgtgtttatcttgaccgtctcaaagaccgtgtgaccttggtttactgggattattatcaggatagcgaagaaaaatacaatcgtaacttcagtaaccaccacaagattagccaggatattgcctttgcaggtggggcttggaagtggattggttttacgccccacaaccatttcagccgtctcattgcagtagaagccaataaagcttgccgtgccaaccaaatcaaggaagttatcgtgacgggttggggggacaatggtggggaaacagcccagttctctatcttgccaagcttgcaaatctgggcagaacttagctatcgcaatgatttagagcgtctatctgcccacttcaagactaatacaggtctatctgttgaggactttatgcagctggatcttgccaacctcttgccagacctaccagacaatctcagtggtatcaatcctaaccgctatgtcttttatcaggatgttctttgcccaatccttgacaagcacatgactcctgaacaggacaagccatactttgccaaggcggctgaaattctttctgacattaaagaaaaagctggtgtctacgcctatctctttgagactcaggctcagttgaatgccattttaagtaataaagtggatgtgggccgacgcattcgtgaggcctatcaagcaggtgataaagagagcttgcaacaaatcgctagaggagaattgccaaaactcagaagccagattgaaaccttccatgacctctttagccaccaatggttgaaagaaaacaaggtctttggcttggataccgtagacatccggatgggtggactcttgcaacggatcaagcgagctgaaagtcggattgaagactatctagctggttccatcacatgtatcgatgaactagaagtagaaatcttgccattcaacgatttctacggagatcaggacttcgcagccacaacggctaatcagtggcatactattgcgactgcctcaaccatttatacaacgtaaaaaatgccaagtcggatgacagaaatctcatccatggtcgataggagtagaagaggagctgtctttacgaccacccttttctactcttttttaaaactatgtcataaatttgtagaattttttctataattaggagtttgaaaatgtaaatgggctatcttataataggtgatgtaaacgctaccaaagcaaataaacacgctcaaggctcaaaggggggagttaaatgaaaaagtttgtaaggactctgagagaaaatttcatttttcttttaatggtcttacctggtgcagcgtggttaatcttattcttctatattccggtttttgggaatatcgtagcatttaaggactatcatattacgggagagggcttcattgacagtgtcatgaagagtaagtgggttggctttgacaacttcaaattcctctttagttccaaagatgcctacattattacaagaaacacggtattgtacaacttaggattcattttcttaggattgattgtttccgttgggatcgccatcatctttagtgagttgagatcaaaaagagtggtcaaggtgcttcaaacctccatgctcttcccatacttcctatcatgggttatcatcagcttcttcaccgatgccttcctgaacgtggacaaaggattggtcaaccacatcttaacttcatttggtatgaaagccatcaatttctactcggaattgtggatctggccagcgcttctcctcttcttaggaatctggaaaggctttggttatagcagtgtcatgtactatgcaaccatcatgggaattgacccaacttactatgaagcagcgaccgtggatggtgcgtctaagtggcaacgcattcgcaacatcaccattcctcagttgtcttccttgattacggttttgaccattcttgcagtcggaaatatcttccgcgcagacttcggtcttttctaccaaatcccgcataatgctggagcgctctatagtgtgacaaacgttattgatgtttatgtctacaacggtctgaccaagtcaggggatatcgggatgacagcagcagccggtctttaccaatcggtagtcggtttggttcttgttttgatctcaaatatcattgcccgtcgcattgataagaatgccgctctcttctagaaaggaggatcgtatgaaaaaatcaaccattcaaaaagaaaaaattgataatgtcgggatccattctttcagtaagaagagcaacttcttctttaccttgttgttgaccttggtcggcttgacctgtgtgcttcccttcatcttcgttgtcatgatctctttgacagacgaacaaagtttggcagtccatggtttccaattctggccagcaaaatttggatttgatggttacctcttcttggtacaattcaaagacaaaatcttgcaagccctcttcattaccttgtttgtgaccattgtgggaacagcatgtaatgtctttatcaccacaacttatgcttacgctatctcacggagtacctttaaataccgcaagttctttaccgtattttcactccttagtatgctctttagtgcagggttggttccaagctacattgtgaccactcaactcttgcagttaggtgataccatcggggctttgattatcccaatgttgctcagtccatttaacatcatcttgatgcggaccttctttaaacggaccataccagaagccatccttgaatccgctcggatcgatggggcaagtgaaacacggatcttcttccaaatctgcttgccattgtctcttccagggattgcgaccatcagtttgttcaccgctttagggttctggaatgactggttcaacgccctcctctatattaagagtgacaacctttacccattgcaatacctcttgatgcaaatccaaaacaatatggattacatcgctaaaaacgtcggggtatccggccaattggcaggagctgtacaatccatcccacgggaaacaggacgtatggccatggtggttgtggcaacagtgccaatcgccattctctatccattcttccaacgctactttgtaaaaggcttgaccatcggtggtgtgaaagaataacatcgttcattgaaaatcaacaggattttcaactcataacttagtctaaaaagaaaataacataaaggagatttttcttatgaaaaattggaaaaaatatgcgttagcatctgctagtgtcatcgctcttggagctactcttgctgcttgtggaagccttacaggtaacaacaagaaatcagcaacaactgaagacggtaaaccaatcatcaagatgtaccaaatcggggataaacctgataacttggatgttcttcttaaaaatgccaacaagatcattgaaaagaaagttggcgcaaaattggatatccaatatcttggttggggtgactacgcacaaaaaatgaacgttatcatctcatctggtgaaaactatgatattgcctttgctaataactatgttatcaacgctcaaaaaggtgcttatgctgacttgacagaattgtacaagaaagaagggaaagacctttacaaagcacttgacccagcttacatcaaagggaacactgtaaacggcaagatctatgctgttccagtagcagctaacgtggcatcttctcaaaactttgccttcaacggaccacttcttgaaaaatatggtatcgatgtctcaaacgtgaaagactatgcttctcttgaaccagtcttgaaagctatcaaagaaaaagatccaaacgttgttccatttgcaatgaacaagagctacggtggaccttcagatgacttcgactacgtggctgttgatggacttccattcgttgttgacttgaaaggtgacactactaagattgttgaccgttacaccattcctcgttatgtagaaaacttgaagactcttcacaaatactacgaagcaggatacattccaaaagacgtagctacaagcgacactggttatgatctttctcaagatacatggttggttcgtgaagaaacagtaggaccagctgactacggtaacagcttgctttctcgtgtagcaaaccgtaagatcgacatcaaaccatttactgaactttacaagaagaacaatactactcaggtagctaactttgttatctcaaacaactctaagaacaaagaaaaagcaatggaagtgttgaacctcttgaacactgatccagaactcttaaacggtcttgtttatggaccagaaggcaggaactgggaaaaagttgccggcaaagaaaaccgtgtcaaagtcttggatggctacaacggaaacactcacatgtctggatggaacactggtaacaactggattctttacatcaacgaaaacgtaactgatgaacaaattgcacaatctaagaaagatttggaaactgcaaaagaatctccagcacttggcttcatctttaacacagataaagtgaaatcagaaatcactgctcttacaaatactttgaaccaatttgcaggtgctatcaatactggtactgtggatcctgaagtagaagttcctaagatgcttgaaaaattgaaatcagaaggtgcttaccaaaaagtgcttgacgaaatgcaaaaacaatacgacgaattccttgcttctaaaaaataagaacaggtagttcgaaaaaggctttggaggaatctccagagccttttcatgtctttatgaaaatagaactgtaaatgaaaatcaatatttcaatttaccaatgcaaataagggaaagcgttttatttttatggtataatagaatcactaattggaaaagaggctgaatgatgggaaaaatcatcgagttcatttttacgagagtctatgttgctatgctggtaacagggattttttgggtcttgacgatctgtgggggtgttctactaggagtaggaccggctagtgccactatcatgagcctctatgcggaaaatggcatgacctacaaggactatcattggtcacgcgcttgggaactcttcaaagaaaatctacgcccggctaatcaagtcttttataccttctttgccattgaaggggttctcctctatggcatgtacctcatggtccagattcctcacttgaatttcttccaaattttggttctcttgtttaatctggttttcctcttggttgcgcctctagcttacgccgtttatttgaaattgcaagttcattttgatctctcttatgccaacagtatcaagctcagtttgatcggaatgttgctggacattcgtccggttctcaagctcatccttggaaccgcgctacttggtgtcattagctactatatgccagcccttctctttttcgtcttgatcggtgtatggcatttctttgtcaatgatatctttgaccctgtttatcaaaacatccacgaaaaattggtatcctaacgatgaaaaaaatctggttaagtacgcttttaaaattctacgcctatgtcatggtggtcattttgaccattatgggcctggttgttgcggggatctcttggaaaaaccagcaagctgaagccgaccggatcgcccaacgggtcttgaccgaagtggtgacggatcttgagacctcttatcaacgggtcacacaagaaggtcgtagcctcgttgaaaaccctgcaaaattagaaggagtttatcgctattttaccttgtcaccatcggagtatgagacttggagattgaatgcccaattcccttcgtatatccaattgtccctacataagaatattgacagcctctatttgagcaataaaaacatcgagggcatcgatgtcaccttgtctgattacaagacggtatttgtctctacccggcaatcacagggaggcaagcaagtctcagcggaccattacaaggctcctgcgacagccattccggttcctttgacagatccgactacgggtgctggagttgggattgcttatatgacgctgaaccaagaaattttgacggcagcgattgataatgccagaggcgatcttccggtcgctgtacggatcttcactccctttgggaaagagatgtaccatgaaggggataagggacaatcaaaagatgttaaatggcaaacccgtagcacgatctatggctacaaggtggatgtagtcgtttctgaaagttatttggtcaagaagggtctagctaacctgaccacttttctctccattgctttcctgattttcttgatcctgtacttgttattaggtcagattttcaaaaattaccggcgtcaagtcctcgatttggtcgataccatgaatcagatcagtcaaggcgatagtgaacgtcggattgatacttcgacgaaggaccaagaacttttggtcattggtaatatgatcaataccatgttagacaatatggacaagaacattcgggatatctaccagttgcagctcagccaaaaagatgccaatatgcgggccctacaagcccagatcaatccccatttcatgtacaatacactggaatttatccggatgtatgccgtcatgcaagagcgggatgaattgggtgatattatctatgagtttagtagtcttttgcgcaataatatctcagatgagcgagtgacgacggttgaaaatgagctcgaattttgtcgcaaatacagctacctctgcatggtacgttatcccaaatcgattgcctatggctttaagatcgatccaggcttggaaaaaatgaagattccaaaattcaccatccagcctttggtcgagaactattttgcacatggagtggaccacaaacgcaaggacaatgtgattagtgtcaaagtcttgcaaggagaagggcaagtcatgattctagttactgataatgggcgcgggatggaagaagaacagctagaaaaaattcaagagatactagccaatcgcaatccacgctcagaaatcgaagaaaagagtggccggcagtccatcggaattgtcaatgtccatgaacgcatgctactctattttggagatcgctaccatatccaagtcttctcccaacctcaccatggagtgacctatacgataaccattcaagatgaataaaggagacagaatgtacaaagtcttattagtagacgatgagtatatgattacagaagggttaaaaaaattaatcccctttgaccactggaatatggaagtggtcgcaactgcagaagatgccgaccaggcccttgattatgtgcgagagcatccggtggatgtggtgatcacggatgtcaatatgcctggaaagaccggacttcagatgattgctgagatgaaggatttgatcccagatgctgcttttatcattatgtcaggctatcaggattttgaatatgtcaagacagccctcaatttgcgcgtggtagactacctgctcaaacctgtcaataaggtggagatgggcaatatcctagaaaaaattcagcaccaaatccagcaaccaagccaagagttggccaaccgcttgattcacgatgatatctctgaggaagagttttgtcggtatatcgcaggccggaattcactgtggattggggttgctaaggagaaaaaaggctttatcagctcgtcttaccaagttctcgggcaaaatcttcaactctttatctcagatcaagaagaagaagccatgattgaaaaggcctttgagcccccttataaggagcactttcatcaatttaaggacctagtggagcggagcctcttttatggggcgacccctctcaatcaagatgaagaagtcttccattactacgagccggcctatcgggtgatcatgcaaggaaatatccaacagatcttagaagaactggactggttagaaaaaatgatccttgagaagacccctaaggtctcactgaccaagcagctctttatccaatttttgatggatgtctttcatttgtttgaatacctgcaaggtgataatttagctgatgtagtcaagaaagtccaagaaactgccacttttagcgagatgattggctttatccaggaagagttgtcccgtttcttatcccactatcggatgaatgaaaatgtagcgagtgtcctccaagtgattagccgtgattaccaaaaagagctgtcactcaaggacatcagtcagggtctctttatcaatccagtctatttaggccaattgattaaacgagaaaccaatgcgactttcgcagaactcctcaacaaacagcggatcaaggctgcccagcagctcctcttatcgaccaatgatagtattgaagatatctgctacaaggtcggttacagtaatgttggctatttctacaaagttttccgcaaactctgtggcaaatcgcctaaaacctatcgcttacaagtcatgacagagcatacagaagatgagtaaaaggctgagacgattgtctcagccttttgattgaagataaagtcttcttagaaactttccttaggtgagtacgtgacagaaggtcagagaccctgaagctaagttttgagtattttttatttgacaaatataagtagacagtgtatactttataaaaagtagacggcgtatactttgataaggaaaggtggtcaaatgaaacggaatacggaagaactgaaagaaaagttaattttggtcggcattgaagaaatcagaactaacgggattgaccggatgtctatgcgtacaatagctcaaaaatgcggggtgactcatggagctccctataagcattttggaagtaaagatagatatattcaagtggttatggaacacttatcaatgttctttttgaaaaatatgatacaagggattgatacttctatagatgcaagaactcaactaactctgatgggctgtaactttgtaaggtttgcccaagaggaaacctatctatttgaagcattatttatcaaatttccatataactatttggagttatctcaggaaactatttcagtcaactcctctttaccaggatttgaacattttaagtcggtagcgttaagacttaaagatgaggaaaatctttctagtagtgacgcagaaattttgatccatttttggagttttattgctggtttggctctattggtaaggagtcccgttggagaaagctttaaagaaaatgatgttcaaaagaccgttagaacgatgcttgatatttatataaaaggagatagctgatgaatgttttaataatctattcacatccgaatgaaacaagttataatgcatcaatccttcaaactgtgcaaaagcatttagcaccagagcatgaggttaaaatagtagacttatataaagaaaactttgatccggttttacgttttgatgaaaggcataaaaggagagatttacagcataatgaagacatgaaaccgtatagagatttattgagttgggcggatcagttgatttttattttccctacttggtggagtggaatgccagctattttaaaaggttttattgatcgtgtttttgttgcaggttttgcttatcagaatggacctcgaggtccggtggggcaactagatggaaaagcgtggatcattacgacgcataatacgccaaaaatttttcttcctttttctcaagactacgcaaaggttctaaaatcccaaatcttgaaaccctgtggtattaaaccggttaaagtgacacaagttacacgagtggagtatatgagtgatcgtcaacggaaagaagaactcgaaaaaatcgcacagatagccaaaaggatttaaaaacgtgcgttacaagtcatgacagagcatgcagaagatgagtaaaaggctgagacgatttgtctcagcctttttacttttcattttacgttctttgtatcttgattttcccaaccaatatttgggcctcaatggtgatttctgtgagttgggtccagtcgattttttcttggtctacgtgaaatagaagaggggtcatggcgaggagcgcctggcgttcttcaggagttaaactcttggtgaggctgaccgtttcggatgagaggatttggcagtggtcttcaaagtgcaccaaaatttcctggttggagtaggattgcttggtcaattgatcttgggccaactgacgaatttctttcagatgagaagaggttggaacgaccttaatgatgaccccttcagcctttaaaacacgctcaaattcagcgtaattagccggggagaagatgtccaaaatgacctctatactcttggattgaatgggtaaatgagccaagtctcctacaaaccaattgaccttccagctagcgtcactcttggcagctagttgcacagattccttggaaagatcaaaggcatagaaagtagccttgggataggcttcttgtagttttcgggagtaatagccttctccgcaaccgatatctagaattctggcatcactggtcggaattttttgtccgatcgctgttagaatcggctcataaaaacctgcttctaagatcagctggcgattctggaaattttctttgtcatagtccttcgattgtttgatctgaggagccaggttgacatagccaaattttgctaaatcaaaagaatggcccttgggacatttaaaactggtccccacaagttctaggttcaattgacaaatgggacaggcaaaagcagtggctgtttgaaatcgttgtaattttggtttgatcggtgtattcatattagtagtgtaacaaaagagcctctagatagcaaccgatgttttaatgggactaagtcacacttttttaacgaatctacgcggtattgaatggaacttgagtctctttatttaatttcctcattttaatctcttctatctcgccactcatctcttcattttgaccacttatccccaaaagccgttttttaagcggcttttttgctagactggttctatcaaaaggagagagaacatgatattacaagctaaaaacatcagtaaacgatatggaaatcatttagccgtaaacaatattcacttacagtttgaaaagggaacgtttaatgcaattctaggaccaaatggggcggggaaatcaacgacgatttccatgttgattggtttgaaacaagcaacgcaaggtgaaatcatctatgaaccagatactaaaattggtgtggtcttccagactagtgtcttagatgagatgctaacggttagagaaaatctgaccattcgtgccagacagtacaaaggcctaaaacccaatcgtgtatctagtctcattaatcggctaggtctatcagctttccaaaagcagaaatacgggacgctttcaggtggccaaaagcgtcgggttgatattgcgcgtgctttgctctcacaaccagatattcttttcttagacgaaccaacgacaggtttagacattcaaacccggaagtctatttgggatttgctctatcaattgcagaaagaagagggaatgactgttgttttgaccacgcattatcttgacgaggcagatgaagctgatcaaatttatattgtagaccatggggaagtgattgctcaaggatcggcactagatattaagagtcaatatgcaaaaagcatcttgaagattcgtttcaaggagagacagcagatagaaagtctcaaaacttcgggaatgtcagtagagcaacaaagtcaattggagtatgtttttcaacctgagagtgaaagggaagccattgattacctgacacaagttagagataatctagcccattttgagtttcgtccagggaccatggatgatgcctttattgcacttacaggaagggaggttcgctaatgctagccttactaaagcgaaattttttattgtacttcaggaatcgttcaggagttttcttctctctgttgggagccttgatttcctttgttctctatattatttttcttcaaaaaaatctaacagatgcttgggctcagctccccaatagtggtcctgtgttaaataattggttaatgagtgggacgctggctgtgacagggattacgacaagtctggcttccctgactcagttagtaaaggaccgtgaacatcaagtagatcaggatctttatttatcggatcaagggaagtggcggttagcattttcgtatctaacgagtgcgatcatcatttctttttccatgcagatccttatgtatgtgctgatgtgtggctattttagagaagttccaaccttatctctattacctgaagtgctcctcattatgctccttagtagcctgctttctagcttagtgaatgccatttttgtttattttttccaatccgtagacagtcttgggaagttttcgaccatagtgggtacagcttctggttttttggtagggacttatgttcctttaggtgttttacccacttttgcacaatcactaatgaagtgcactccagcaacttatattgctgcactttatcgacaagtcctcatgaaagaagcattaagtgagacctttaaaggtcaagataatcttcttcgagagtttcaagaaaaaatgggtgttcagctcaaatggcaaactttattgacaaaggaacaaacataccttatagtgttaggagatattcttctagctttggggatttggatttccttggcaaaaagatcgagtaaaagaaagtaagtgagaattggagtaggaatgaagattcgttttgaggaaaaacaagatatcccagaaaacgacccctgtgtggtcattcaagccaagcaattatctgatcaagcacgagaggtgatggagtatctcgaacaattttcgacagtgaatcaagtagtgatccctatcaaaacagatgatcatttgatcatggtgaaaattgatgacattattctagctgagattgataagaatcagctaaccatttatacgatagacaaaacgttcaccatcagagatactttgataaattttcaacatcggattaatcgtcgtaattttttacagatatcacgccacgcggtgatgaatatcgaccatttagaatcgctatcggatagtttttcaggcaatatgatggctaaactgacacgtggagtaaaatcaagtgtcagtcggaaatatgtcaaatccttgatggattatttaggggtataggagaaagtgatgaaacgagttatagcttattttgtatctggtatgaggacaggatccttcttttatttgtgtttggtgttattatcccatgtctataccaacatcgtctatcccgctgtaaatgtccgcaacatcctagcgatatttttgatgagtgggacaatgggggtcttgaccttcattcttgaggaagaagagtttttgacctatagtttgcgtgtggctttgcatttagttgtgacagctgccatcttagcattaacctacttgttttttggctgggggacagccttacggagcccgattccttggttgatctttctagccatttacggcctgatctggctgtaccagatttggcaactccataaaaaaactcaacgaatcaaccaagctttgttgcatcgcagaaaagggaaatagtcccagaaaaagtgtataagaaaaccacgaagttcatacgaaacttcgtggttttactttcttaataagtcaaaacaaagtattttttcttaccgcgacggataacggtcaattcattttctaatttatcgctatcgctcaagacatagtcaaggtcttggatgcgttcgccgttaacgtagatagctccgttttgaacatcttcgcgggcttggcgtttagaattgaccacaccagctgtgaccaagagttcaacaatgttgaggttgtcttctgcttggacctggtagtttggcacaccacgaaggccttgtttgagttctttgacagaaaggtttttgatgtttcctgcaaagagttgttcggtgatgttgagggcttccttgtaggcttcttcgccgtggacaagggtaaccacttcacgtgccaagatcttttgagctaggcgttcatgaggagcaacctcaaactgtttgcggatctcttcaatctcatcaagtgacaagaatgtgaagatcttcaagaagcgcacagcatccgcatccatcacattcatccagaattggtacatttcgtatggagatgttttgtctgcattgagccagaccgcattgccttctgatttaccgaatttcttaccagttgcatctgtgatcaaaggcacagtcataacatgaccagttttatctgctttacgacgcatcaactcagtgccagctgtcatgtttccccattggtcagatccaccgatttgaagggttacattgtgttcttggttgaggacgtagaagtcatagccttgcataatttggtaggcaaactctgtgtaagaaatccctgtctcaatccgttttttaacagattctttactcatcatagcattgaccgtaaagtattttccgacatcacgaaggaagtcaataaagctaatgcttccgaaccaatcgtagttgttgaccatttcagctttgttgtcgccattttcaaaatcgaggaaacgagacaattgcccttgaatggaacgaacccattcttgtacagtttcttttgtttggagactacgttcagcatctttgaaggacggatctccgatgagaccagtcgcaccgccaacgagcgcataaggtttgtggcctgctagttgaaggcgacggctcgtcaagatggcaaccaagtgaccaaggtgaaggctgtcagcagttggatcgtagccagaataataagaaacctgaccttcttccagggctttgcgcaaggcttcttcatccgtcgtttgaaataccaaaccacgctcttttagctcatcaaaaatgtgcatgtgtcttttctcctttataagtttattcatttctctattctaccataaaccacagaaatggcaatgctttccatcattttcttgaccttatccaagaagagtgagtgacgatttctacgctcttgtgattgaaaacaaaggggctaatctgctataatatagggaacaaggagaaagaatcagtgaatcaattaaaagagaagctgcaagatttttggaagaagatccaaaaattctttgcaaatatgtatacagaaactccaaataaggaaaaaaaagaagagagcagttggtctattggggatatttttgcgacctctttacggaccctcaaactcttgtgggatgtcatgatagcccttgctatttgcctctttttatttggtgcagggatcgggattggttatgctgcgagtctctttaacaatgttaaggatccgaagacagaggaattggtccagcaggtgcgtaatgttagtagcgtttcaaaactgacctattctgataagagtttgatttcagaagtagacagtgatttgatccgcacaccagtagctggagatgctatttcagacaatgtcaaaaaggctgtgattgcaaccgaagatgagaattttgaaagccacaagggggttgtgcccaaagccgttcttcgggcgacgcttggatctgtagccggcgttggctcctctagtgggggatcgaccttgacccagcagttgatcaaacagcaagtcgtcggagatgctccgacctttactcgtaaggcgacagaaattgtcgacgcccttgccttagagcgagggatggataaaaacgaaatcctgaccacttacttaaatgtttcaccttttggacgaaacaatcggggacaaaatattgcgggtgtggaagctgcggctcaagggatctttggagtctctgcgaaagatctgtccgttccacaagcggcctttatcgcagggctgccacaaagtccgattgtctactccccttatgctgcagacggtagcctaaagagtaaggaaaatctagagttaggtttggcgcgtgccaaagacgtcttgttcaatatgtacaggacaggagtcttatcgaaaaaagactacgaaacttatgctcagtatgatttgaccaaagacttcatcgcttcggatggcatcgagaaaacgccacatgactacctctatttccaagccatgaaagaggcgaaagaggccatgtatgattacttgatcaaacgagacaatgtgaccaagcaagacttgaaaaataatgagacggttaagtcttatcaaaaattggctgaaagtgagttgcgtgaaggtggctacaccattcaaacaaccattaacaaaccggttcacaatgcgatgcaggctgcagtggcgaattttggaaacgtcttggatgatggaacgggacttgtagaagttgggaatgtcctcatggacaatcgaaccggtgcgattttaggttttatcggtggacgtaattttgatggcaaccaaaacaaccatgcctttgatactgaacgttcaccagggtcgactatcaaaccgctgttggcctatgggattgccattgaccaaggcttgatgggaagcaatagtatcctttctaattacccaactaatttctcaagtggcgaaccgatcatgcacgtagataaccgaggaacggctatgatggatcttcgtgaggctctcaatacttcatggaatatcccagcctattggacctaccgaaccctacgtgaaaaaggggtggatgttccctcttacatgaagaagatgggctatgatatctctgaatacggaattgagagtctgccgatgggtgggggtattgaggttactgttgctcaacataccaatggttaccagaccatagccaataatggaaactacctcaagcgttacatggtagagcaaattattgatcgggatggggatgtggtctacaagcatgaagcagatcctgttcgtgtctactctccagcaacggcaacgattatgcaagatctcttacgtggagtgctcacatctggggcaaccacaaccttcaaatcacggcttagtcaagtcaatccaacgctggctggtgctgactggattggaaaaactggtaccactaattcaaatggggatatgtggttgatgttgtccacgccaactgtctctctaggagggtggattggtcatgacaacaatgcctccatgcaggcactaacaggatataacaataatgctcagtatatggcacaattagtgaatgcgatctatcaagcagatccgagtcttttgggtgtccaagacaaattcactttcgacaagagtgtgatccgttctgaagtactcaaatcgactggtgaaaaaccaggccgcgtcaatgtgaatggtcgagatgtcgatgtgagtggtcaaatggtaaccagcctttgggcaaaaaatggagccccaaccactcagtatcattttgcgattggaggttctgacagcgattatcagaacgcttgggcggctattctaggtaatgctggtggcaatcaaaacactaataaccgaaataataatacaaatagtagtgaaacaagcagtagttcaagtagtagcaattcaagcaatacttctacaaatcgaaacagctcaaatcgtgacaatcggcgctagtcttatctagtagaaaacctagtgaaagtcttgatttttgaaggaaaaaacgatataatagttacaactaatttgtcgtgtgctttatttgaaatattgtccaaataagagcttacagcagttaaatcttacttgaataagtcgatttagctgctctttttgtgtctatttttagggaaaattatagcttgttacagaaacttaatttttctaaaaattacaaaaatgacaaatgaggggaagagacagctcttcacgtgatgcaaatcacactaatgtagttaaaatcggataggtggtagaaatcgttttactaagctatcctagtatggaaaaaggagtaaaaaactttggcaggacatgacgttcaatacgggaaacatcggacccgtcgtagtttttcaagaatcaaagaggttcttgatttaccaaacttgattgaaatccagacagactcattcaaagatttcttggatcatggcttgaaggaagtatttgaagatgtgcttcccatctcaaacttcacggatacaatggaattggaatttgtgggttatgaaatccgcgaacctaagtattcgcttgaagaagcgcgcatccacgatgccagctactcagcaccaatctttgtgaccttccgcttggtcaacaaagaaacaggtgaaatcaagacccaagaagttttctttggtgatttcccaatcatgactgaaatgggaacctttatcatcaatggtggagaacggattatcgtatctcagttggtccgctcaccaggtgtctacttcaatgataaggtggacaagaatggtaaggttggttatggatcaactgttatcccgaaccgtggggcttggttagagcttgaaactgactcaaaagatattgcttacacgcgcatcgaccgcacacgtaaaattccatttacaactcttgtgcgtgctcttggattctctggagatgatgaaatcatcgatatctttggggacagcgaattggttcgcaataccattgaaaaagatatccacaaaaatccaatggattcacggacagatgaagcccttaaagaaatctacgagcgtcttcgtccaggtgaaccaaaaacagcggaaagctcacgtagcttgttggtagctcgtttctttgatccacgtcgttatgacttggcaccagttggtcgctacaagatcaacaagaaactcaatatcaagaaccgcttgttgaaccaaacaatcgcagaaccattggtagatgctgaaacaggggaaatccttgtagaagctggtactgtcatgacgcgcgatgtgatcgacagcatctcagaacaattggataacggtttgaacaaaatcacctacattccaaatgatgctgctgttttgacagaaccagttgaattgcaaaaattcaaagttgtcgctccaacagatccagaccgcgttgtcaccatcatcggaaatgccaacccatctgacaaagtacggattgtgactccagctgacatcttggcagaaatgagctatttcttgaaccttgcagaaggccttggccgtgtagatgatatcgaccaccttggaaaccgtcggattcgtgccgttggtgaattgcttgccaaccaagtgcgtcttggactttcacggatggaacgaaacgttcgcgaacggatgtctgtacaagataacgacgtcttgacaccacaacaaatcatcaacatccgcccagtaactgcagcaattaaagaattctttggatcttcacagttgtcacagttcatggaccaacacaacccgctttctgagttgtctcacaaacgtcgtttgtctgccttagggcctggtggtttgacacgtgaccgtgccggatatgaagtgcgtgacgtgcactatacccactatggtcgtatgtgtccaatcgaaacacctgaaggaccaaacatcggtttgattaacaacttgtcatcctacggacacttgaacaaatatggtttcatccaaactccataccgtaaagtagaccgtgaaaaaggtgtggtgaccaacgaaatcgtttggttgacagccgatgaagaagatgagtacattgtcgcacaggctaactctaagttgaacgaagaaggtggctttgctgagccaatcgttatgggacgtcaccgtggtaataaccaagaattcccatctgatcaagtcgactacatggacgtttctccaaaacaagtagttgctgttgcgacagcatgtattcctttcttggaaaacgatgactctaaccgtgccctcatgggtgccaacatgcagcgtcaggctgtcccattgatcgatccaaaagcaccttatgtgggtactggtatggaataccaagcagcccatgattcaggagctgcagtgattgctcaatatgatggtaaagtcacttatgcagatgcggacaaggtagaagttcgtcgtgaagacggttcgcttgatgtctaccatattcaaaaattccgtcgttcaaactcaggtactgcctacaaccaacggacccttgtaaaagttggcgatgtcgttgaaaaaggcgactttattgctgacggtccatcgatggaaaaaggggaaatggcccttggtcaaaacccaatcgtcgcttacatgacttgggaagggtataacttcgaggatgccgttatcatgagcgaacgcttggtgaaagaagatgtctacacatctgttcacttggaagaattcgaatcagaaacacgcgataccaagttaggccctgaagaaattacccgtgaaattccaaacgtcggggaagatgctcttcgtgacttggatgaaacaggtattatccgtattggtgcggaagtaaaagaaggcgatatccttgtcggtaaggtaacaccgaagggtgaaaaagacctttctgctgaagaacgtctccttcacgcgatctttggagataaatctcgtgaagtgcgtgatacttctcttcgtgtacctcacggtggagatggagtcgttcgtgatgttaagatctttacacgtgcaaacggagatgaattgcaatctggtgtgaacatgttggttcgtgtttacatcgcacaaaaacgcaagatccgcgtcggagataagatggccggtcgtcacggaaacaaaggggttgtgtctcgtattgttccagttgaagatatgccttaccttccagacggtacaccggttgatatcatgttgaaccctcttggggtgccatcacgtatgaatatcggtcaggttatggaacttcaccttggtatggcggctcgtaacttgggtatccatatcgcaacaccagtctttgacggagcaagctcagaagatctctgggatactgtgaaagaagctggtatggatagcgatgccaagaccatcctttacgatggacgtacaggtgagccgtttgacaaccgtgtttctgtcggtgtcatgtacatgatcaagcttcaccacatggttgatgataaactccatgcccgttcagtcggaccatactcaatggttacccaacaaccactcggagggaaagctcagtttggtggacaacgtttcggggaaatggaagtgtgggcccttgaggcttatggtgcatcaaatgtccttcaagaaatcttgacctacaagtcagatgatgtcaacggacgtttgaaagcttatgaagcgattaccaaaggtaaaccaattccaaaaccaggtgtaccagaatccttccgcgttcttgtcaaagaattgcaatctcttggtcttgacatgcgtgtcttggacgaagatgatcaagaagtggaacttcgtgaccttgatgaaggggaagacgatgatgtgattcatgtggatgaccttgaaaaagcacgtgaaaaagcagccaaggaagcaaaagcagcctttgatgctgaagaatcagaaaaataatcagtaaaaatgattgtcttgtgagaaacgaatgcttctagcaggatgattcgataacaagatacagacacaaggaggtggcaagaaagtttcctttcttcccccacctaagctgtattcaaatgaaacaagtatgaaaacaaggaaaggtaagaaatagtggttgatgtaaatcgttttaaaagtatgcaaatcaccctagcttctccaagcaaggtccgttcatggtcttatggagaggtcaagaaacctgaaacaatcaactaccgtacattgaaaccagaacgtgaaggtctctttgatgaagtcatctttggacctacaaaagactgggaatgtgcgtgtgggaaatacaaacggatccgttacaaagggatcgtttgtgaccgctgtggggttgaagtaacacgtgcgaaagttcgtcgtgaacgcatggggcacatcgagttgaaagcacctgtatcacacatctggtacttcaaaggaatcccttctcgtatgggattgactttggatatgagtcctcgtgcccttgaggaagtcatctacttcgcagcttacgtggtgatcgatccaaaagatacaccacttgagcacaaatccatcatgacagaacgtgaataccgtgaacgcttgcgtgaatacggaccaggttcctttgtagctaagatgggtgcagaagcgatccaagacctcttgaaacaagtggatctggaagctgaaattgctctcttgaaagaagaattgaagactgcaactggtcaaaaacgtgtgaaggctgtgcgtcgtttggatgtcttggatgccttctacaaatctggcaacaagccagaatggatggtcctcaacatccttccggttattccaccagatcttcgtccgatggtccaattggatggtggccgttttgctgcctctgacttgaatgacctttaccgtcgtgtgatcaaccggaacaaccgtttggcacgtttgcttgagttgaatgcccctggtatcatcgtgcaaaacgaaaaacggatgctccaagaagctgtcgatgctttgatcgacaacggtcgtcgtggtcgtccgatcacaggaccaggtagccgtccactgaaatcattgagccacatgctcaaagggaaacaaggacgcttccgtcaaaacttgctcggtaaacgggtggacttctcaggacgttccgttatcgccgttggtccaactcttaagatgtaccaatgtggtgtgccacgtgaaatggccatcgagctcttcaaaccattcgtgatgcgtgaaatcgttgcgcgtgatatcgtacaaaacgttaaagctgcaaaacgattggtcgaacgtggagatgaacgcatctgggatatcttggaagaagtgatcaaagaacacccagttctcttgaaccgcgcaccgacccttcaccgtttggggatccaagcctttgagccagtcttgattgacgggaaagctcttcgcttgcacccacttgtctgtgaagcctacaatgctgactttgacggtgaccaaatggccatccacgtaccactttcagaagaagcccaagcagaagctcgtatcttgatgttggctgctgagcacatcttgaatccgaaagacgggaaaccagtcgttaccccatctcaggacatggttttggggaactactacctcactatggaagaagctggtcgtgaaggggaaggcatggtcttcaaagatcgtgatgaagcagtgatggcctttcgtaatggctatgttcatttgcatacacgtgtcggaattgcgaccgatagcttggacaaaccatggacagaagcgcaacaacacaagattctcttgacaactgttggtaagatcctctttaacgatatcatgcctgcagagcttccataccttcaagagccaaacaataccaacttgacagaaggcgttccagctaagtacttcttggagcctggtcaagatgtgaaagcggcgattgagaaattggaattgaacgttccatttaagaagaaaaatcttggaaatatcattgcggaaatcttcaaacgcttccgtacaaccgaaacttctgctttcttggaccgcttgaaagacttgggttaccatcattcaacccttgctggtttgacagtggggattgccgatattccggtcgttgaagataaggcagaaattattgaagaatctcacaaacgtgtggaacaaatcaccaaacaattccgtcgtggtttgatcacggatgacgaacgctacaatgccgttacagctgaatggcgtgcagctcgtgagaaattggaaaaacgcttggtggataaccaagatccgaagaacccaatcgttatgatgatggactctggagcccgtggtaacatctcaaacttctcgcaacttgccggtatgcgtggtttgatggccgctccaaacggacggatcatggaattgccaatcctttcaaacttccgtgaaggtttgtctgtattggaaatgttcttctcaactcacggtgcccgtaaagggatgactgatacggcccttaagacagccgactcaggttacttgactcgtcgtttggttgacgttgcccaagacgtcattatccgtgaagatgactgtggaacagaccgtggacttgtgatccgtgccattactgatggtaaggaaatgatcgagccattggaagaacgcttgacaggtcgttataccaagaaatctgttaaacaccctgaaacaggtgaagtgatcgttggtccagatactttgatttcagaagacttagcacgtgaaattgtcaatgctggtgttgaagaagtcactatccgctctgtctttacatgtaacacccgccatggtgtctgccgtcactgttatggtatcaacttggcgactggtgatgcggttgaagtgggtgaagcagtcggaaccatcgctgcccaatctatcggggaacctggtacacagttgaccatgcgtaccttccacacgggtggggttgcctcaaataccgatatcactcagggtcttcctcgtgtccaagaaatctttgaagcccgcaatccaaaaggggaagcggtcatcactgaggtcaaaggggaagtcacagctattgaagaagatgcttctacacgtactaagaaagtctttgttagtggagcaactggtgagggtgaatatgttgtcccttacactgcccgcatgaaagtcgaagtgggagatcaagtttctcgtggtgaggctcttacagaaggatctatccaaccaaaacgtctccttgctgtacgtgatgttttgtctgttgaaacatacctccttgcagaagtacaaaaagtataccgtagccaaggggtagaaattggcgacaaacacatcgaggtaatggttcgtcaaatgattcgtaaggttcgtgtcatggatccaggagatacagaccttctcatgggtactctcatggatattacagactttacagatgctaataaggatgtccttatctctggtggagtccctgcgactgctcgtccagttcttatgggaatcacgaaagcctcacttgaaaccaatagtttcttgtcagcagcttccttccaggaaacaactcgtgttcttactgacgcggcgattcgcggtaagaaagaccatctcctcggactcaaggaaaatgttatcatcggtaagattattcctgctggtacaggtatggctcgttaccgtaacttggaaccacaagcgattaatgaagttgaaatcatcgaagaagtgccattaacagatggaacagtcgatgaagttcaaacagctgaagtcgtagaagaataaggtcttgttgcctctagtagggcgatgaaagaaaagctaaaagagagaagatcgaacggtcttctctctttttatacgtagaatagtccaaagaagtcagaaccatgtgttctgttttttttgtttctaaaaataataaaaaacgactaatgaatgtataaaaaaactattattattttactaaaaatttaagcttctcaaaaccaaaggattaaaatattgataattagtgattttagtggatatgtattacaaagcctaaaataaataaatgactaactattagtaatttgtaaataaaacacgaaaaaatgtttgacaattaaactaattggaggtagaatgagaaaagatgtacatatatttaaaaaatgttgatatagcatgcatttcaacgggagaagtttatggaaaaattgaagataatggttgtttttggaactcgacccgaggctataaaaatggctcctttggtgttggaattgcaaaaacaaagtgaaataattcaaaccgtcacggtagtcactgctcagcatcgtcaaatgctggatcaagtcttagagacctttaaagttgtaccaaattacgatttgaatatcatggggaaaagccaaaccttattagagattacaactaaaattttagataaattagatccaatcattaaaaaagaaaagccagatatggtattggttcatggagatacaacaactacttttgctaccagtttagttgctttttacaatcaagtaagaattggccatgtcgaagctggtttacggacttttgataaatattctccatttccagaagagatgaatcgccaaatgacagataatttagcagatctatattttgcaccgactggcgaaagtaaggccaatctattaaaagaaaatcatttcgattcttctattgtggtcacagggaatacagctattgatgcactgaaactcactgttcaggaagattatcatcatgaggtcttggatcgattggatccaaccaaaaaattgatcctcgtaacgatgcatcgaagagagaatcaaggatcaccgatgagagctgtatttggtgctttaagagaaatggtcgatcaagaaccagatattgaagtggtatatccagttcacctgagtccggcagtacaagaagtagcgcacgatcttttgggaaatcatgaacgaatccatctcatcgagccgttagatgtttttgatttccataatttagcttctagaagttactttattatgtcagattctgggggtgtccaggaagaggctccatcattaggaaaaccagtattggtattgcgagatacgacagaacgcccagagggagttcaagcaggaaccttaaaattagtcggtacggatcctgaaactgtcaaatctacgatgtcagagctgttaaatgatgaaaaactgtactttgaaatggcgaatgcacgaaatccttatggggacggaaaagcctctgcccgaattgtacaagctattaaacattattttgctttgggagatgccgctgaggaatttcatgagggagatgaaaactaatgaaaaaaactgataagttaagtagatggttgctgattctgatcgtttttgaagttcttctatttctgtactgcttattttttgcaaaagaaattcttattgaagaaggactgttcctgataacagggttatttgctgctattgttttgtctgatttattattgacgtggacgatccttctttcatttgcctttggaattgtattcttagttgcaggtattgtctatattccatttcaccagtctttgctactactcttcagttttccgctattgattgcaatcttaattcaagttcgagatcatcttttcaaagaacatgcaaaaataaaagatcaggaaacagaagctgatgtagattattgtaatcgatttgaatcctttgaggatcgaaataatacgaagatccaagccttattaattcactggtctcatgaggaattatttttccaattacagcctgaagaatatagccaaatgttgaaccaaatccacgatcttttatcccaatatgtcaaacatgatgaaagcttatattatgtatcggatggtaattatttatttttatcttctgatagccagagggatttgaaaaacgaatatgactccgtgataaaaaatcaattggaaaaccttgttttttgtggagaagatggggagcaatcggttcaatttcaatcaggatttgttgtagtggatcaaacaaataaaaccaagtatggtgattataaagatttgattagtcatttaaaacgtcaactagagacagatatcattgttgaatattaggaggaaaatatgacattaacgaatttattttttaacatggccgtaggtatcagtgtattttttgttttatgcttcattgtattatttgtggattatatgatgatttaccattctgtgaataaaaattttaaggcggtgcaccatgattagtcaaattgtgatgattattgccctggtttcgatttggttatctttagcctggggactggtgattctcttctcagccgttcatttttggttcaaacatagtgattttcgtgtcaatacggatccccttccgtattaccctaaagtgaccattgttgtaccagctcataacgaggatgtggtcattgctcaaacagccaaagcgattcttgacatgaactacccacatgatcgtgtcgaattattgctgtttgcagataattgttcggataggacctatgaagagtgtctttcagtccaagcattgccagagtacgcaggacgcgatttaacaattattaatcgaagcggaacaggtggaaaagctggcgtacttaatgatgctttgaagatggctacaggagactatatctgtgtttacgatgcagatgctatgcctgaaaagaatgcgctttattttttagtgaaggaagtacttaaagatccggaacgtcatgtggcatcctttggtcgaaataagacgcgaaatgcagggcaaaattttttaacacattgtatcaatcaagaaattgtcgtcacccaacgggttcaccatgtcggtatgtggcatctatttaagattggacggattccagggacaaactttattatccaaaccgaatttgtaaagagtattggaggctggaaaaatggtgccttgacagaggatacggatatctcctttaagattatgcaaagtgggaagttgattgctctcgcgtataattcagaagcttttcaacaggaaccagaaactctgaagagttattatatgcaacgtaagcgttgggcaaaaggaaattatgaggtagttctttccaactttaaacatctatttggaaaaggaaattggcgtgtgaagttggaagtcattaattactcctgcatctttttctggtttaatgcagcgatcattttatcagatttgatttttttcgcaaacattttagctatctgtatccattcagtcgtcccaggagttcaaataccatttgcctttgattctgataatatttatattgctcaattaatgttgtttaattggattttgatgattggaatttatcttattcagatcaatgttgcactagcatcgcagtttggtcaggcaacgatcaaacaaatttggttagctctggccgcgtatttcacctattcacaactgtttattattgtatctgttgatgctgtttcttctattgtgatggataaactgttgcatcgtgagggaacaaaatgggttaaaacaaaacgattcgcggggtaggagatcttatgaaaatgaaaaagtttagatatttatggtttgtgattattctttgcattttctgtatgaccttattttttgcgagaactagaagcaagatagagatgcgaaatcgaatctatcgccagtggaatcaacagtttgttgtttcaaaggggaaggaatcttatattcgtactaccaatgattcaaatcagacagtcgtcttatctgaggcgcaaagttacgggatgttgattacagtagaggctgcaaaaaaaggtcaggcccaccaagaagactttgaccgtctctatcaatattatctgaaacaccgcttaggggacacccagttgatgtcttggaaacaaacgatctcagatggaaaggttgcagctgaggatcataatgcaacagatggggatctttatattgcttattctttgctagaagcgtcccatcaatggccaaagcaagctaaaaaataccaagctcaagctaaagctattttaggagatatcttaaaatataattacaatgaagaaacaggtgttctaacagttggaaattgggctaatggggattcggatttttatcatttgatgcggacttctgatacactgccagcacaattccaggtcttttatgaagttacgcaagatcccaagtggttagatattaaagaaaagatgttgaagcaactagatacgattagttcgcaatcgaatacaggtttattacctgatttcatttgggtagaggaacagggaactcgtgtggccgatccgaacacgattgaatctaagtatgatgggtcttattcttataatgcttgccgtcttccatataatctagttcaaagtaaggatccagtcagtcaaaaaatggtaaaaaaaatgttaggtttctttaatgatcagagaaacttatatgctggatatgatttgaaagggaaggcattgaataatcatcaggctgcaagtttccttgcaccaataatttttgcgtctgaaagagaaaagagttatttaaaattggttcaacagaataaatatatatttacacaggatcttcctcttaataactattatgacgcaacaatgacaaccatgatcgcacttgaactgttctaatcgtttgaagttagaaaaagagtctcacaagatagcacttctattttgtaggggctctttgatttattttcaaaaaaaagtcccaaactgaatctgaccgtctattttcaaaaaaaagaaatggaaagtttatgaaaattacttgaaaattcactctgtgagcagaaagcttttattctcaaaggattttctatataatagaggatacaaaggatggaagagtttatgtatcgagtgattgaaatgtttggggactgtgagccctggtggtttttggatggatgggaagaagatgtcgtcagtagtcggaaatttgaagactattatcaggctttaaaatactacaagcagaagtggttagatttaaatgcgcactttccaagttataagagtagaagtgatctcatgacagttttttgggattccaaagagcaagagtggtgtgaggactgcagtgaagatgtgcagttattccactcgcttgttcttttggaagatgaacacaaaattccaaaaagcaagctccgtccaggttacgaaaaggaaaaagggagtcggaaacaccgttcttgtcaatttactctcgacccgaataagagtacaaaatccctgtcataagagaaatcagaagattttttagagcgatctagaaagtcttcttttttgttttctttttcgaatagtataagtgagaggaggaactatggttcaagaaattgcaaaaaaattgatccgtatggggaagaaggaagaagctcaggatctctacttcattcctcggaaggaggagtatcaggtttttatgagggtcggagatgagaggcgttttgtgcaatcctttccttttgaggagatgacggctattatcagccattttaaatttgtagcagggatgaatgtgggagaaaaaaggcgcagccagctaggatcgtgtgattaccctttggaggatggagtggtttcgattcgcttgtcgacggtgggggattatcgtggctatgaaagcttggtcattcggcttttgcatgatgaggaacgcgaattacggttttggtttgatcagctacctgagttgcagaagaaattggctggtcgtggtctctatctctttgcaggtcccgttggctcgggaaagaccactctcatgcatgctttggcgcaagagcgctttgcagatcagcaagtcatgtccattgaagatcctgtcgagatcaagcaagagaatatgcttcagctccagctgaatgaccagatcggcatgacctatgacaacctgatcaaactctccttacgtcatcgaccggatcttctcattattggggagatccgagataaggaaacggcccgtgcagttgtacgagctagtttgacaggggtcaccgtcttctctacgattcatgccaagagcgttcgaggtgtttatgagcgccttttagagcttggagtcagtgaggaagaactcaagattgttttacaaggtatttgctaccaacgattaattgcaggaggaggtgtggtcgattttgcgacggaaaactaccaagagcactcagccagccgctggaaccaacaaatggatctcttggctcaatcgggatatatccagctggctcaggcacaagccgaaaaaattatctaccgctaaacaaaagcaaatcatcgaattatttttgaatctttattcgagtggttttcatctgtctgagatcgtcgattttctggatcgctcccacctagtggagagtcgtttggtttcccagatgcgagaggatctctcgcggggccggagtttttcagagatgatggcggggatcggtttttcagatgcagtgacgacacagctgtctctcgctgagctccatggcaatcttgcattgagcttggagaaaatcagtgcttatttagaaaacatgcgcaaggtcaagaaaaagctgattgaggtgagcacttatcctcttatcttacttgggtttttagttttgattatgctaggcctgcgtaattatttgctccctcaaatggatgctcaaaatattgggacacaattgatcagttccttcccccaactctttttggccttaggatcgggactggtggccttcttcttactcggctttctctattatcgaaagtcaggcaagatcaaaatttttagaaacttgtctcatctgcctttcgggaaaggcatgattcaagcttatttgacagcttattatgccagggaatggggcaatctgattgggcaaggattggagttgtctcagattttttccatgatgcaggagcaaaaatcccagctttttcaagaaattggaagggatttagctctttctttagatcgtggtcagtccttctcagagacggtcagggggtattcttttttcaaaaaagaattgccccttatgattgaatatggtgaagtcaaatcaaagctcggaagtgaactagagatctacgctgaaaaaacatgggaagacttctttcgtcgggttcacaaggccatgaatgtgatacaacccttggtctttgtctttgtggctcttgtgattgtgttactctatgcagccatgttgctgccgatttatcaaaatatggaggttcatttatgaaaaaattaaaaacctataaggtaaaggcctttacacttattgaaatgttggtggtcttattgatcatcagtgtgctcttattgctctttgtgccgaatttgaccaagcaaaaagactccgtgaaagagacaggaaatgcagcggttgtgaaggtggtcgaaagccaggctgaattgtacgagctcaatcataccaatgaccaagccactctagcaaaactgattgctgatggaaatattaccaacaaacaagcagaatcctaccgtgcctattatgcgaaaaatagtggagaaactcgtgcggttgcagattaaggccttcactttggtggagacccttctgaccttgatgatcgtcagttttatctatctgggcttatcgggatcgatcaagacgagctttcagcaggtggaagaaaaagtattttttgcagagtttgaacacctctatcaagaaagccagaagatagcactggcaaggcaaacggaattggatgttgaagtgactgcaaggaagattcaaacgccttatcagacggtggagattcctgattctgttattttgcaagatcctaaaactattcatttagaccgtgcaggtggcaattcatccctggccaatgttcactttcagacacagagaggagtggtgacctatcaactgtcgcttggaaatgggaaaattaaaaaaagcatccgttcccgctagtattctcatagaatctttggtagctttgggtttatttgccatgattacgaccttattgttaggggagatccggcgttcgcgcaaggagcgactagcggatttcaaagaggtagaggtcttatctgtcgctcaaatggcgcttcagacagggcaaaatcatcttgaggccaatggtattcaggttcaagtcgaaaaagatgccgatcaactcacggtctatcatcaaggaaaggtggtgctgcatgtggaataaaggaaaggtcaaggcctttaccctgctcgaagccttggtcgctctcttagtgcttagtgggggagtgttggtctttcaaggcttgaccaagcttctgcatgctgaattggactaccaggcgcatcaaaagcaggaagaatggatactttttcagcaacaattgcaggtggaattggaccggagtcattttgaaaaagtagcggacaatcatatctacttggttcaggatcaaaaaccaattgctattggccaatctaaaggagatgatatccgaaaaacagatgataagggcaggggctatcagcctatgatttcaggtgttcgctctagccaaatttggcaggagggagatttgcttcatctgcggttggattttgaagaaggtctagaaagggagtatgtctaccatgtggtaccagcgatacaaaatgaaaaaagttaaggctggtgtcttgctttacgctctcttgatggcagcgattttttgtctcttgcttcagttttacctgcaccgtcaggttgcggagagacgaatcttaaagacgagtcaagagcgtcttcgggcctatgctttggtgcaattggctcttgaaaagagaaagagtgatgagaagacttcagagattcatttaaagtctggaacagttcagctaaagaaggatactggttttcttcatgcccaagctgagatggatggcgaaagctatgagtttgtccttcctgtgagagaagaaaaggaaagcaagaagagccaaaaagaaaagaagacacggaaagataaggcgaaggcagggagcgaaacgccttctgaagagacgccaaacgagatcaaggaaccatcagaaaatagcgaaaaagactaatttttggtatgatagggtgcggaggacatcatgaatttcgaaaaaattgaacaagcttatacctatctattagaaaacactcaaagtattcaaaatgaattgtcgaccaacttttatgacgccttgattgaacaaaatgccatgtatttggatggcaagactgatttagacattgttaaaaacaatagcaaaaaattaaaagaactaggtttaagtaaggaagaatggcgcagagcctaccaattcctttttatgaaagctgctcagacagaacctttacaagcgaatcaccagttcacaccagatgcgattggttttatcattacatttttgatcgatcagttggctaaaagcgaccaactggatgtcttagaagtgggaagtggaaccggaaatctcgctgagactattgtcaacaatagccgtctcacgattgattacttaggattggaagtagatgatctcttgattgacctatctgctagtatcgcagatgtgatggagtctagcgttgtctttgcacaaggcgacgcggtgcgtccacaagtgttgaaagaaagtgacttgatcgttagcgacttaccgattggctattatccagatgatgcgattgcacagcgctatcaggtggcgagctccgaaggccatacctatgcccatcacctcatgatggaacaggctctgaaatatctgaaacctcaaggagttgccatctttttagctccaaataacctcttgacaagccctcagagtgatctgttgaaagcttggctaacagacaaggcccaactccttgccatgctgaccttgccagaatctcttttttcaaatccagcctatgctaagacgattttcgtcctacgaaaacaagaagaagaatctgttcagccctttgtctatccttttaccgatctccaggatcaagaccaagtggttcacttcatggaaagtttccaaaactggttaaaggatagtgaaatttgatcaaagatctgatataatagaggaagtgaaaacgcttaatgaggtgaatatatgtcgaaaacaatttctattaatgcaggaagctctagtttgaaatggcaattgtaccaaatgccagaggaaactgttcttgcaaaagggttgattgaacggatcggtttgaaggattctatttcaaccgttaaatttgatggacgctctgaaaaacaagtattagatatccaggaccatacacaagctgtaaaaattttgttggatgatttgattcgttttgatattatcaaatcctacgatgagattacaggtgtgggccaccgcgtcgttgctggtggagaatacttcaaggattctgccttggtagatgacgaagtccttcgaaaagtagaagaattgtctttgttagcacctcttcataatcctgcaaatgcagctggaattcgtgcctttagagagatttgtccaaatattaccagtgttgtggtatttgatacttctttccatacaaccatgccggaaaaagcttatcgttaccctcttccaactaaatattacacagaaaataaggttcgtaaatatggcgctcatggaaccagtcatcagtatgtagctggtgaagctgctaaacttcttggaaaaccattagaagaattgaaattgatcacctgccacgttggaaatggtgtatctgttacagcggttgacaagggaatctctgtcgatacctcaatgggcttcactcctctaggtggtgtcatgatgggaacccgtacaggggatcttgatccagcgattattccttacttgatggaacatacagaggatttcagtaagcctgaagatattagccgcatcctcaatcgtgaatcaggtcttctgggtgtttctggattttctagcgacatgcgggatattcatacagcgatgcacaatggagacgaaaaagccaaattggcatacgatatctttatcgatcgtttgcaaaaatacatcggtcaatacttagctgtcttgaacggggcagatgccatcatctttacagcaggaatcggtgaaaatgcagtaaacgttcgttcttctattatcaatggaatcagctggtttggctgcaaggtcgaccctgaaaagaacgtctttggagctatcggagatatttccacagatgattcacgtgtgaaggtattggtgattccaacggatgaagagttggtgattgcgcgtgacgttgaacgtttcaaaaatcagtaaactgaaataaagtgagaaggctggaggcgaaagccccagtcttcttattttatacaagaaagaggttgtccattgaaaaatatacagtcttttattcgagagcacccattatgtcagaatgccctctggctccttctttttgtgcccttattctttctctcacaattccccctcatcaccatggtttattcccttcaagaaggaatggatgcaaggtgggtcactatcctcactctcttgggaacagtggcggtgctctttgttttttataaggtcatcaagatgagccctctggagaacttagatgttcgggtcataacctggccggttctggggagaaattttctttttcttctcttgttgatggctaataacctgctagcctatcccttgttgaaacaagaggcaggtggtacgacggcaaaccaagcggctctgaatgaactacaatctcatgctccttttctcgctatgggaatggtcgtgatccttgtcgctccgattctagaagagctactctgtcgggccatcatccctcgtttgatctttcgaggggcagaaccgatcggttacctagccggtgctctcttttttacctacttgcatggaccgagtaccctaggggagtgggtagcttacggaggcatgtccttgatcttaacttgggtggcttatcgctataagcggatcgagtatagcatttgccttcatatgaccttgaatgcgctggcttattattatccggtggtcatgctcctttgtttattgccagtatggagagttttcttccatgataaattatgataaaatggtaggtaccaatgagttttgatgcagaaccttcgtacagaaggtcagaaaaataagcaatccgtatggagaatgaactcagaggtttagaacatttgttctagcctcttttgttcgcaatcatgctgtaggaagggaatcaaaggaggacgaaaatgattgataataaatggctgagtggccaagggacccttctttgtgggatcttaaatgtcactccggattcattttctgatggcggtaagtatacgagtgtggatgcagccttgcagcaggcgagaaaactgatccaagaaggagctcaactcctcgatatcggaggagaatcaaccagaccaggtagtcattatgtggagatccaagaagagattgaccgcgtggttccggtgatcgaagccattcggaaagaaagtgatgtctggatctcagtggatacctggaagtcccaagtagcagccgcagcactcgaagctggagccgatattgtcaacgatattacgggttttcttggagatcctgagatggccacggtcgttgcggagcatgaagcgagcgcggttctcatgtttaatccagtgatggcaagaccgcatcatccaagttccactatttttccacgttttggttttgaatcagtcttttcagagcaagagcttcaacagatggctcaagaaccgattcaagacttgatgtggaccttctttaaccgctcgcttgcggtagcgaaagtagctggtgtccagacggatcgtatcatgctggatcctgggatcggatttgggttgaccaaacgtgagaacttactcttattacaagaactcgggacgattcaccaaaaggggtatccgatctttctaggagtctcccgcaaacgttttgtggtcaatattattgaggaagctggatttgaggcagatcctgcaacggagattggtttttggaatcgggacctggcttcgagccatttgacgagtattgcatccagtcaaggagtcgaagtagtgcgggtgcatgatattcctcttcacaagatggcagccagtctgggccaagccattttccaagcccaagaggcagcagataccaatttaaaacaatacaagtaaatgaagacaaaagaacatcagttggatcttcgttggctagaagcctatcgttcccaagatccacatttcggtttggagcgcatggaagctctcttggctttgagaggaaatcctcacttagactgtcgggtcattcatgttgcggggaccaatggcaaaggctctaccattgctaccttatcccaactcttgaggctggcaggtttacgcgttggagtttttacctctccttatctgatccattacaatgaccaaatcaccattaatggcgaagctattgcggatcaagacctgcaaacctacctggatagttaccagcagctcctggaagctgaagaatcaagggctatctttcaaggtttgactgaatttgaagtgatgacggcgattgcctatgattattttgctcacgaggagttggattatgtgatcatggaagtcggtatggggggacgactagacagtaccaatgtctgtcagcccattctgactgcgatcacttcgattggcttggatcatgtcgctcttcttgggccagatctggcttccatcgcccgtgaaaaggcaggcatcattaagccaggaattcctctggttctagggaaattagaagcagaagccagccaagtcattgaaggcattgcgattcaggagcaggcaccgataacagcctatgacagagattaccaagttgagctagaaacctcttgtctatcaggtcaatccttttcttatcacagttccaaaagagaaaaagcctcttatcaaatagcgctcttaggtcatcaccaggccagaaatgcagctcttgcgatcagtatctgtgatgtactttttgaaagagaagggcgtgaactcttgtcaagagagttagtggatgaggccttgcatcaggtcgtctggcctggccggatggaagtggtctcgcaaaatcccatgatcttgctagatggggcccataacccccacgccgttgcgcctttaatcgcaagtcttcgggaactgttcctaagtcaaaaaaagaccattctttttacctgcatccggaccaaagccttagaagagatgctcattcaatggcaggcactagaaaatagtcgcttgatcctcacgacctttgaagatccaagagcctattctcaagaagagataagagctgctgcgaaaaaccatcagcttgaggaagtcaactggcaagagtttctacaaaactggcaagcaaaaggcgatgagctcctcattgtaacggggtcgctctacttccttagccaggtacgaccttatttattaaaaacagaaaaatccaactaggagatgatatggatacaaagaaaattgaagaagcagtgaaaatgatcatcgaggcagtcggtgaagatgagaaccgtgagggccttcaggaaacgccgacccgcattgccaagatgtaccaagaaatctttgcaggactggggcagacagcagaagagcacctgtctaaatcatttgaaatcattgataacaatatggtggtcgagaaggatatcttcttccattccatgtgtgagcatcactttttaccgttttatggaaaagtgcacattgcctacattccaaatggccgtgttgctgggctttcaaaactggctcgtacggtcgaggtttatgctaaaaaaccacagattcaggaacgtttgacggtagaaatcgcagatgccttgatggaatatcttggagcacaaggagcacttgtctgggtagaagcagagcatatgtgtatgaacatgcgtggtgtccgtaaacctgggaccgctacagtgacaactgctgcgcgtggactgcttgcgacagataaagacttaaaaaatgaagcctataaactcatgggccactaatggctggctataagaggtgaacagagtggatcaattacggatcaaggacttagaggtatacgcctatcacggtgttttcccagcagaaaaagaattaggacaacgctttgtcctagacttatgggtagattatgagatgactcgcgctgcccgcacaggtgatttggaagcttcgatccattatgggatcttggcggaacagttgaccgagtggatgcaggcagaaaagatcgatctgattgaaacggtggcctttcagttggtgcaaaagattttcgaaagctatgcctttgtagaaaaagttcgtctggagttgaaaaagccctgggctcctgttcccttgccattagagacttgttcggtgacaatcgaacgggagaaaaaacgggcctttattgggcttggcaccaatatgggagataaacaactgcaactagagacggcgctagaaaaaatcaaggatcgaggcattcgcctccttcagacatccacaaggattgaaacagaaccttggggaggagtggagcaggacacctttttgaatcaagtggcagaggttgaaacctggatgaccccagaggatttactagagactttacttgccattgagcaggaaatgggacgtgtccgtgaggtcaagtgggggccacgtgtgatcgatctagatctgctctatatggatgacaccatttgttacagtccgagcttgatcttgccgcatccttatgtggcagaacgagcctttgtcctagaatctttgaatgaaattgctcctcattttgtggaccctgttcaaagaaagcccattcgccaattatgggaggctgtcaaatagtttctcttctttgcatcataaaaaaacaatccctgttcgagggattgttgagagcgtagataaacgaatctttaataaaatctaatcacttctttaaaaattatactcgttatagttattcaatcatattctgaaactttccgctgtgagaaaagtgcctgaaacgactcagtttcaggcactcggaattattgagacctcaggctcaataattagtcttggaacttcgtagaagttcgctgacgtccgtactcacctaaggaaagttttttaagaagactttgtcttcaatctgaacactccctcgagcagggattgtttttgtttgtcttagtttatttacgatacaagcgatcgtattggtagacaggatccatggtaacgttgataccgagcttgcgaaggacgttcttgtcttcgtctgtcagcatcacggttgaatgggcttcgctacctttcaacttgcctaattcttgcatagcaagcttagcatcttcgttgctcatggctgtaatggccagggcaatgaggatttcgttcgagtgaagacgagggttacggctgcccaaatgattgatcttcaggccttggataggctgcacgtattctggctcgattaatttggtttctttgtcaatatgcgccaatttcttaatcgcattgatcaagagggctgcggttgggccaaagagatcggaggtttttccggttaccatctcgccgtttggcaattcaagggccaaggctggctcccctgtttcttcttctttttggcgggcaagaacggtcactttccggtcatttggagtaatgcccaaatcattcatcaagagctcgatcttcttgacagctccttcaccgacacgctctgctttaacatccaaaatggtttggtaatagcgacggatgatttcttgttgggaagcttcaatcgcagcgtcattgtccacaatggcaaagccaaccatgttgacgcccatgtctgttggagaagcataaggtgaggttcctaagatgcgttccaacatgcgcttcaagacagggaagatttcgatatcgcggttgtaattgaccgttgtttccccgtaggtttgaaggtggaaaggatcgatcatattgacatcgtctagatctgcagtcgctgcttcataagccaagttgactgggtggtgcaaaggaagattccatactgggaaggtttcaaacttagcataacctgatttgatcccatttaattggtcatggtacatattggacatacaagttgccagcttaccagaaccaggtccaggagccgtcacaacgaccaaattgcgactagttttgatgtagtcatttttccccatcccttcaggagagatgatgtggtccatatcagtcggatagcccttgatcggatagtggagataagaggcgatcccgctcttgtccagttgtttgcgaaaggcgtctgctgcagcttgtccagcatattgggtgatgacaacggatccaacatagatgccgagttcattgaatttgtcgatcaagcgcagtacttcttggtcataagaaattcctagatctccacgggcttttgagtgctcaatattgttggcattgatggcaatgacaatctccacctggccgcgcaattcttggagtaacttgatcttattgtctggttcgtatccagggaggacacgagcagcgtggaagtcctctaacatcttaccaccaaattcaaggtagagcttgccatcgaattggttgatccgctcaataatgtggtcacgttgcaagttcaaatacttttcagaactaaaagcttgttttttcatgtaaaactcctgtatataagggaagggcctgccacacgaatccaaggatgagtgttccgttccctaccatttcattctttcatattatatcagaaaacagatggaagataaaatattctaagatactttcctaaggggaatgtggatgccaaggggctcaatggtgactcacggtggaaagtttccaagagaagtttgttttccctctaaaaaagccccttacggggcttcagatcgatgctacttaatagtgtttgatcaaatcaactgtagagcgatccaatttcttaaccaatgcttgtaagaaggcttgcgcttgcaagaaatcatccatggcatagagggtttggtgagagtggatgtaacgtgcacagacaccaatagtggttgatgggactccgccattcttcaagtgtgctgcacctgcatcggtaccacctttggcacaatagtattggaatttgatgcccgcttcttcagcagtagtgagcaagaaatctttcatatttggtagcatgatgtgacctggatcgtagaagcgaagcagtgttccttccccaatcgcaccttggtctccaaagacatcagctgctggcgaacagtctaccgcaaggaagatttcaggatcaaatttagtggttgaagtgtgagctccacgaagtcccacttcttcttgaacgttggcccctacatagagttcgttatttaaggcttgtccagaaaggctcttggccaattcgctgaccatcaagacgccgtagcggttatcccatgcttttgagatgacgtttttaccattagcagtaagaatagcagagctatctgggaccaaggtatctccaggacggaccccatagctttcagcttcggctttagagctaaagccagcatcaaagacgatgtcgctaatggcaggtacggttggtccacctgttccacgtgtcaaatgaggaggaacagatcctgaaatagcagggtattcacgtccgtcacgtgtaaagagtttgaagcgttggctgctgacgaccatcggattccaacctccgattgggacaacacggaaagtcccatcagctttgatttcgctgatcataaaaccaacttcgtccatgtgggcagctactaagatacgaggagcatcggcagctgttgaatgtttgaccccaaagatcccaccaagaccatctgtcacgatttcgtccacatgaggggtcaattgttggcgcaaataatcccgtacaggagcttcatgacctgagatagcagggatttcagttacttctttgattttagaaaataaatcagtcataggttaccttctttctgatgttattttatcactttttctacaaggatggtagcgttattatggaaatcagtctctaaaagcggagggagagatctagcctagaccgttgtccctctgcttattttgtgttacaataggcactatgaaagctaaaaaaattattttgtctagtctggctgtagcaagtgcaggagcccttgcggccggtgtttataaaattgccaaagatcaaaagcgtctccgtacccaagaagaattggtagcagaagtacgggagcaaatggaagccatggggacgattgcgactctgtatgtggaactctacgagtctagtgaagagcgcttagtaggaggcgtcatttttgaagatgagcgccattaccgctttgtctatgaggacggtctcttgcattatgaagaggaaaaactatgatcacaccgagttctctagaagaaattgcttcatatgtagagcaagatggcaagaaagtgtttgtcttttcagccgactggtgtggggattgccgttacctcaagccttttttgccggagattgaggctgaaaatcccgaatttacctttatattgattgaccgagatgcctatctggatctggcgaaagtctgggatgtttatgggatcccaagtttggtggttctggaaaaggataaggaaatcggtcggtttgtcaatcgggatcggaaaaccaaagcgcagattacagcatttttagcaggattaaaataggagaaaaacatgattgtaacatacaacaaagaacaagtcggcgatgtattgatgctgaccttgaaaaatagtggagaagcaaagctcgcggttgagagaaaaggaaaagtggctcgcgtttaccgtgaggacaaccaagaaaccgttgcctggaatatctttgatgcctcatctttcttcgccatcgaaggcaatggccaagtctttttgacagatgagcaagtagttcgtttgaatcaagaattggaaagagaaggtttttcagaacgtttggtcaacgatcgggaaccaaaatttgtggttggagaaatccttgaaatggtggcccatccagatagtgaccacttgaatatctgccaagtagcagttggagtagataagacggttcagatcgtagcaggggctccaaatgcgcgggtgggtctaaagaccattgtcgctcttccaggtgccatgatgccggatggcagcttgattttccctggggcccttcgtggagaaaaaagctatggcatgatgtgcagtccacgtgaattgcacttgccaaatgctcctcaaaaacgaggcattattgaattggatgatgcagaagtagcagggacaccttttgatcctgctcgtcactggcatgaataaagagaagaatctaggatgttttggatcctagatttttttgattttggtttgtcacctccattttttaaaattttttcgaataaatagataggaggtaaatgatgtataataaagttattttaatcggtcgcttagtagcggccccagaattgcataaaaccagcacagacaaatccgttgcccgagtgactgttgcggtcaatcgtcgctacaaggaccaaaatggagatcgagagacggattttattaatgtcgttgtctgggggaaattggctgaaaccatggctagttatgccagtaaaggaagcttgatctctttggatggagagattcggacacgccgctacgagaaaaatggggtcatgcagtatgtgacagaggtcctctgccaaagttttcagttgctagagagccgcgctcagcgagcgatgcgtgaaaatggtggaacgggagatttggccgatattatcttagaagaggaagatcttcctttttagaggagataaagaaagctggtttgttaaaagaccagttttttaatatttttcagagagattattcggtgtttattctttttaaaaggattggaaaattgatctgcacaataaaaaccagcactttttttgaaaaagtagtaaaataaagtaatatatattcaaaattttcagaaaaggaacggagtttgaaggggaaagaagaaagaaaagaactgttaaaatggctgataaaacgggttctactggtgattccagtgacctgcatcctcttgtggatctatgccgtttgtcaaaccagtagcatcaaggatcagaccaagatcggtgtcacctatatgaccatgaacaatgagttctataaaagtattcattcggaaataagtcgaattgccgatgagaaagaggctcttgtatctgtccgagatccagaattggacgaaaaaaggcagagccagcagatcgatgatttttgcgctcaaaaggtaaatgtgattgtgattaatccggtcaaaggagatagtcagcccattttaagggctcttaaaaaagctagaaaacaaggaattaagatcattgcagttgatacccagatcaagcattttaagccggatgccagcattgtctccgacaactaccaagcaggagtcttgattgcaaaagagctgatgaaacgctcttcaaatgctcggatccttctcttggagcataaggggactgtttcagcagatacgcggattcagggatttaaggataccatcaaaggacatgggtcatatgagattatctcggaactagaaaccaagggtcagacggagatcgctatgccagctgtccgtaagttcttgcagtcagggggaaatgtcgatactctagtttccttgaatgaccgttcagctataggagctttagcagcgatcaaggagcaagggatcacccatcccattgcgatctatgggattgatggctcaccagatatgaaagccttgctgcactcgacagatgatgttgtaggaaccgttgcccagtctcctttgaagatgggagaccgcgtgatggaggtcatccaagatatggctgatgggaagagctaccaaaaagaaataaccattccggttcagatgatgacaaaggaaaacatcgatcaatttgatgtgaatgggtggcagtaatgagaaaatttagaggtgtgagatacagtttggccatcctgatggtcgtgaattttatcgctgtgatgctcaacagtatcatctatcttcaagcaaccaactatatcattgcccaacggcaagcttctctattagtagaacgcttagagcgtattccttttgcgccctctacaactttttggttgtctgcgctcttatttgctggaattgccttgatctccatgagtcgttaccggtctcaaacgagtcgatggtccatttttgataagtggaacattctggagatcctcctgatgttgctcttgatgtgggtccagaatgtagcttataacgggctcattctcttggtttttgcggatatcttctatggttccaaagagttgaataccaagcgagaccgcaagtattggtttgcttttatcctagtgagtttcttgatgcttcttgtgaccaattcagacgtcttttcgcttttctttccgataccttctctggatgtctatattcatttttatcctgcctccattcggattctggcctttttcttaaagaattccctctatgccttgaatatggtgctcttcattatttcgcttttgttctatattatgaatgttcttgcggaaaaccacgaagtggaagaagagttggccatggtttcgaaggtcaatacggagttgaacaactatatggccttgtctgagaagattgcagaagatcgggagcgcaagcggattgctcgggagattcacgataccttgggacatgcgctaacagggatctcggcaggtttagatgctgtcggagtcttgattgatatcgatcccaatcgggcaaaagagcaggtgaaaagtgtatcagaagtggttcgtgaagggatccaggatgtgagaggctctctcaaccgcctccgtccaggtgcccttgagggacgaaccctcaaagatgcattagaaaagatgatccgcgagtatcagacgctttccaacttgcaggttgatttacactatgaatgggtcgatgtcgatatggacgtcatgattgaagatacgatttttcgtgtgatccaggagtctatgaccaatgcggttcgccacggtcatgctagccggatgatccttcatttttttgaggatgaagaagattacctgatcgagttgcaggacaatggggttgggtttgaaaccttgacctatggctatgggctcaagcagatgatggaacgaatttctatcctaggaggacagcttcaatttgaaagccgcgatggatttttcacgcgcgtgagtttaccgaaatataaagaagggagatagagatggtgataaaagtaatggtggcagatgaccaggccttgattcgagaatctctaaaaattattttgtcggcccaccccgatatcgaagtggtagccacagtggaagatgggaatcatgtcttgtctagcattccgcagacacatcctgacctgatcttgatggatattcggatgccaggcatggatggggttttggcgacaaaagaagtaaaagaacactatccggatatcaaaattattattttaacgacctttgacgatgatgaatttatctatagtgcactcaagtatggtgcttcaggttatcttttaaagggagcctcgacagaggaactctatgaagcgattaaggtggtatatcagggcggagctatgatcaacccgaatatcgctagtaaagtctttcaaattttctctcaaatggccaaaaccaacttctctattgctgtggatgaggacaatgtcaaggatttgagcacaacggaatggcgcattatccaagaagtcggctatggggagtccaataaagaaattgcggccaaactcttcttgtcagaaggaaccgtgcgcaattacttatcaacgattttggcgaaattaaacctacgagatcgaacgcaattagcgatctggtcagtccaaacaggagtgacgagacgtgatttttctaaaggaaatacagaatgaaattgaagcgaaagcatctttgttgggggatcggtctccttgttgtgctctgtgcaagcgcaggtttttattggtggaaacagcaaccgaccgtactccatatcggcgtttatgcaggttctagctgggatgtgccaactagtcaacgttcccatgccttggatcgtgccattcaaaaatttgaaaaatcccatccccacgtccgtgtagagtatgaaaatgggattccgcagtcagattattcagattggctctctgaaaagattgtttcaggaaagacgccggatgtgtttatggtctctgagcaagatctttccttattagcagcgcggggtgtgctcgagaagttaaacggctatatggatcgaaaagatcaagctgccttttatcccgttgcctttgaatcgggtgtctttcaggggcaaacctatgccttgccttatgaaagcaatccgattttgatgtgtgtcaataaagatctcttggataaagaaggcatcgcggttcccaaagaaggttggacccttgaagagttctatacgatttgcaagaaactaaccaaagataccaatggggatgggcaattggaccaatttgggagtacagaatacacctggaaagaagccttggcagcaaatggaggttatctcttccaaggtggcatgctcaagctgacagctccagaagtgaaagaatctttaacttttctgcaaaaattggaagatctaaataaaaattacaaggtgagctctaaagattttgaccaggggaaagtcgccttctatcccatgaccttggcccaatatcggacctataaaccttatccctaccacgtttctaaatattcaaacttcacctggacctgtatcccgatgcctgctaagtcaaaaacgaccaaggcaaccttggtcacgacgacttcttttgctatgtcggctcgaagttctcattccaagttggcttgggaattgatgcaactcttgacagaggatccagacattcaacaaaccctctttgcccaatcccaagggatctctgtcatgccacaggtagtcaagagtcgctctagtaaagaccttctgcaggtggatgattttggaacagattccttgaccaatcagaccttgaaccgcatcatggaacaagctgttgaaagtagtccgaaaaatgtctcaaaagaggtgctagaaaagctagactacttgattggcaatgccttgcgcgatcaggatgttgagaaccgcttgcctcaaattcagagggagattgaaagtagtctacaggtaggagtttagagcaaaataagatggcattttgtcaagtgacagatgtcattttttaattgctaaatgtcatattgggaatgtgacatttgacaatataaaaacgctttcaaatagtctacaatagagtcaaataaaggaggcgtagaaaaatgaaatacctcgttttggtcagtcatggtggactggcagaaggtctaaaaacatcactggccatgtttgctggtgacaagttggatcaggtcatcgcagttggactcaaagaaggaaaatcggttgatgacttcgcagttgattttagagagagcatttcaggattgacagctgatgattctgttttggtcttggcagatatcgtaggtggtagtccattaaccactgcagccacggttctagaagaagctggaaagctcgatggagccttgatccttggtgggatgaaccttaccatggccttgacggcagttgtgatgaaggatgtgttggatggagacgatttatcagccaccatcttatcagaagcacgatctgcactacagccttttgaagtttcagccactagtgctgaagaagatgatgacgatatttaatagggaggtaccttatggtagtaacatttgtacggattgatgaccgcatgattcacggtcagacagtcacacgctgggcaaaagaaaaaccatgtgatggtttgattgccgtaaacgatgcagcagcatcaaacaaggttttgatccaagcttacaaaggcgcatcagacaagaaaacctttgtatggacaaaggaagcctttaaggaaaaatcagcaaaagtaacggaatcagatagtcgttacttcttgatcaccaaaaatccaatcgatatgaaggaaattttggtcgaccaagggtttgtcccaggtgatgtcaaagaaatcatcgttggccctgcaaatgatcgtccaggtgctgtgaaattggggaataaccaatccatcactcaggaagaagcagaagctttccaagccattcaagcagcaggctacaaggtgaaattccaattgttgccagatgtttccatcgggtattgggatgatttcaaatcaaaatttggtttttaaacccaacagtcttatctgttaggtaaataaatttacaaacaaaaggagcgtttgttatgacaatttcatggattcaagcaatcttgcttggtattttcgccagcttgtcttcaatgcctggtatgggaggttccagtatcgggaactatacactcggtcgtcccttgatcggtgggttgatttcaggtttaattcttggagatgtgacaactggtattatggtcggggttgcccttcaagtcgtttatatcgccttggtaacacctggtggtaccgtatctgccgatgttcgtgccatctcttatatcggtgttcctcttgctatcttgtttgtgcatgccaataacatcacagatgaagcaggaatcgccgcagctgcagctccaatcggtgcagctgttgggacaatcggtacagttcttttttacggtaccgctactatgaacttggtatggcaacacattggttggaaagccgttgaagaaggaaacttcaaaaaactctacgcagttgactgggtttacccttggatctctcacttcctcttctctttccttccaacaatgattatcaccaaatacggtgaaaatatggttgatttgatgaaacaataccttcctatggatggttactggatgaaagccctctttacagtcggtgctcttctcccatgtgtcggtattgccatcttgttgaaacaaattgttacagaagcaactgacttcattccattctttgttggatttaccttagcgaaatctctcggattgaacttggtatccagtgccgttgtttcattaatctttgcagtaatctactatgaacttgaagtgatcaaatcgatgaaagctgctcctgctggagcggtggatctagacgatgatgaggaggatatttaaaatggctgatagaaagaaaatttcaaagaaaacattagcaaaagcattccatcattggtattatggtcatttgacttgtttctctcaagaacatatgcaaaccttcgggtacttgacttctatgcttccaatcgtagaagaaatgtatgacacaaaagaagaacaaaaggatgctatgcaaacctatacggccttcttcaacactgaaccacaacttggatctcttgttgtagggatcacagctggtttggaagaagcgcgtgcaaacggagatgcagtagatggcgaaaccatcaacggtatgcgtgccggtttgatgggaccaatcgctggtattggggactctttggttgttggtaccttgatcccagttctcttggggattgcccttggtctttctaaaggtggtaacgtcgctggtgctctcttctacatcgtcgtatggaacctcttagtctactttggtatgcgctttgccttcttcaaaggttaccaattaggggataaagccgttgaattccttgtaggaccaaaaggacaagctcttcgtaaagcgatcagcgttgtcggtggtatggttatcggtgccgtagcagctacttgggtatctgttacaacagcccttcaatttaagaattctgaaggaaaagtcttcttgaacattcaagaaaagatcgatggtgtttatccaggtctcttgacagcaaccttcatcactctttgctggtggttgatgtctaagaaaaaaatttcaccaaacaaagttatgttacttctcgttgtagttgctttgatcggtgttgcccttggtatcttcgacccacatcttaaatactaaggaaaagaaaaaacgaatttgctagtaggagtttttgagaatgaagtgaattgacctcctttacttgcacttcattctcaatttttatcaggaggaatcccatggttacaaaacaagaacttgtcaatggatatgaaacagaaatcaactaccaacgccacatgcttgaaaaccttggtcgttggttcagcttactctttatcattgccagtattggtgtggtattgatctatctctttcacaaaagtttcctcccactcttgatcctcgggattttactagccttggttggaattttaggcatgattgtttttggatatggcatctaccgcgggcggatcaatcttcaaaaagtgatcgatgatttcaatcaaaaattgacaattttaaattgatattttagaaacatctcatttatttttgaggtgtttttttcttgactatttctgaccaagtgatacaatagaaacataagttagcacttacgtatagagagtgctaaaaacacgtatggaggaatgaacatgttaaaaccattaggagaccgtgtggtcttaaaagtagaagaaaaagaacagactgttggaggttttgtcctcgcaggtgcgagcaaggctgatacaaaaacagctgaagtggttgccgttggtgaaggtgtgcgtaccctaagtggtgaactcatctccccagctgtaaaagcaggagatcaagttttggttgaaagccacgcaggaattgaagtgaaagatggggaagaaacctacaccatcgttggaacagcaaacattcttgcaattgtagagtaagagaagaaagaggtaagagaaatggcaaaagatattaaattttcatctgatgcacgttctgcaatggtccgtggtgtcgatgtcttagcagatacagtgaaagtcactttgggccctaaaggtcgcaatgtggttcttgaaaaatcatttggttcacccttgatcacaaatgatggggtgaccatcgcaaaagaaatcgaattggaagaccattttgaaaatatgggtgctaaattggtttcagaagtggcttctaagaccaatgatatcgcaggtgacggtacaacaaccgcaacggtcttgacccaagccatcgttcgtgaagggatcaaaaacgtcactgcaggtgctaacccaatcggcatccgccgtgggattgagaccgctgttgcaacagcagtagaagctttgaaaaacaatgcgattccagtatcgagcaaggaagcgattgctcaagtagctgctgtgtcttctcgttctgaaaaagtcggtgagtacatctctgaggccatggaaaaagttggtaaagatggggtcatcacgattgaagagtctcgtggaatggaaacagaactggaagtcgttgaaggcatgcagtttgaccgtggttacctttcacaatacatggtcactgataatgaaaaaatggtggcagaccttgaaaatccatacattttgattactgacaagaagatttcaaatatccaagaaatcttgccattgttggaaagcattcttcaaagcaaccgtccactcttgatcatcgcagatgatgtcgatggcgaagctcttccaacacttgtcttgaacaagatccgcggtacctttaatgtcgtagctgtcaaggcaccaggatttggagatcgccgcaaagccatgctagaagacattgccatcttgactggtggtacagtcattacagacgatcttggtttggaattgaaagatgcaaccattgaagcccttggtcaagcagctaaagtgtcagtcgataaagacagtaccgtcattgtcgaaggttctggtaacccagaagcgatcgctaaccgtgtggctgttatcaagtcacaaatcgaaactacaacctctgaatttgaccgtgaaaaattacaagaacgtttggccaaattgtctggtggtgttgccgtgatcaaggtcggtgctgcaacagaaacagaattgaaagaaatgaaactccgtatcgaagatgcccttaatgcgactcgcgcagccgttgaagaagggatcgttgccggaggtggtacagctcttgtcaatgtcatctctgcagtcgcaacccttgaattagaaggagatgaagcgaccggacgcaatatcgttcttcgtgctttggaagaacccgtgcgccaaattgcccacaatgccggttacgaaggatctattgtgattgatcgcttgaaaaatgccgaagtcggaacaggtttcaatgctgcaacaggtgaatgggtgaatatgattgatgcaggaatcatcgacccagttaaagtgagccgttcagcccttcaaaacgccgcttccgtagcgagtcttatcttgacgaccgaagcagttgtagccaacaaaccagaaccagcagccccagcaggaccgggaatggatccaagcatgatgggtgggatgatgtaagacgctacaaatgattgaggctttgcctctaatcatttgacgccagccgctattgtgcggtctggctaatcgtcttactagctcaaagggaggaaaatatcgttcctcccttttcacgtcgtaagtccttggtcaattggttaggtgaatttatagtttacggtaagcaccatggtgtcttgccgaagtgtcttactaagaaaataaagaaggcgttatcggccttctttgttttctgtcgtaacctgtgtaaccgcttgaggcttcgcctctaaccatttgacgccagccgctattgtgcggtctggctaatcgtcttactagctcaaaggtaggaaaatatcgttcctcccttttcacgtcgtaagtccttggtcaattggttaggtgaatttatagtttacggtaagcaccatggtgtcttgccgaagtgtcttactaagaaaataaagaaggcgttatcggccttctttgttttctgtcgtaacctgtgtaaccgcttgaggcttcgcctctaaccatttgacgccaactgctatcaggcggcttggctaaacgtcttactggctcaaagaggctgggacaaaagtcctagcctctcaattatctttggattatcgagcaagacgcagtggttgagtgggctctactacgctgatttcatcagcttttacagccctactcaactgtgcagaggtgggatgacgaaatcgaattctaacgaattaccgatttctgtcctactctctttttcttgttataagttgtgattcttactggctcctttggttaaggaataatatttatattttaaatattgtaacagaaatgataaatactagttaaagagtgtttaggagaatcctttgcgctctaggtttttcagtcttttttggtggagaagtatttgctaacaaattgcaatacaaattaactgattttgtaataattctagtgtatactattaagagtagatcacaggtctacattgttgcaaggggagaacttcccacatacatgtctattgacaataaaacttgatcgtaatatcgctgttagtaaaatgagagtttgaacatggcatagattttatcgacctttttcatattaaaaaatatttttcaaattccccttgcgcaagctcttccggattcctctgggagagtttttttcttgttaaggaaaaaggtagaattgcttttgagtctactttgaaagagtggctcagcatctatcatttatggtaaaatagaagatattcgttgaggggaaggagtgaggactttgttgaagatttttgtattagaagatgagtggatccagcaatcacgaatcgaatctgtcttgcaggaacttattgctcagaaatccttgcaatgcaaaacgccagaagtgtttggaaagtcaagtcagttgctagatgctatcacagagagaggcgctcatcacctattctttttagatatcgagattaaaggtgaggagaaaaagggtctagagatcgcaaaagagattcgtaagaaagacccccatgcgaccattgtctttgtcaccactcactctgaattcatgcccattacctttcagtacaaagtagctgccttggattttatcgataaaacgctgggtgaggaagagttcaaagagagaatcagctcagccatcgactataccttggagcaagctgggaccacgattgcgcaagatgcctttacgtttgagagtgcgatggcgcgtgtacaagttccttttaataagattttgtatgttgaaacgtctccaaccattcacaaggtcattttacacacccaggaagagcgcttggaattttacgctagtattgccgatatcgaaaaagcagatccccgcttgtatcggtgccaccgctcctttgtggtgaatccgcaaaatattacgaagattgataaagaagccaagaaagctttttttgaaaatggggacaattgcttgatctcacggaccaagtacagaggcttactggaagctttgaaaaaatagaagggagaaagaattgctgttagatattctaatgtcttacctaaagttcttcgtcagcatgctgatctatcgtcatatcagtagacaagagttcaccttgcgctggctctttttgtgccccttcttctttgcaattatctttacccttgtgccaccggtaggcttttttggctatttcttagtatttattgcctatagtttctatcgaaatcgtaacatacgacaccttttgaatattttttacgggctctacccggttgtcatggagagtctcattgggcgcctcctagccttttatgtctttccaatgctagggatcgtacttgttcatgaggcatctgtcagctggtatgatgctctacttgaattgctggtctttcctgtttatataggaatcactaaattgttaaaactagattttacagatctaaaagtaggatttcaacggcagtattttaatcgtttcttactcccaatggatctttccatgtttgtgtatttgctcagtgttgtaggtctggtggtttttgaggatattattccgcatgcagatgctttgcggaaacagttaaatagtatttatttgattttgttttttgtgatgctcttgtatttcaatgcagtgtccaaagaacgattgaaacaagagattctggaacaaaaagataggcaactgcaggagttagccacctatagccaacacgtcgaaatgctctacggggagattcgtgcctttcgtcatgattacctgaatattttaaccagtctcaaattaagtattgagcacgaagacctcaatgcgatcagggaagtctatgagaatgttcttcgagagagtggccagcaattttacaacagtaagtttgatattgccaaactcagtcacatagaaaatccagctgtaaaaagtgttctgtccgcaaaattattggaagctcaaaataaagggattgggatctctgtcgagatcgatgaaccagttcgtgatttattcatcgaggttttagatttcatcaccttcttatccatcctttgtgacaatgctatcgaagcgagtctcgaatcagacgacccccagctgactcttgccatgcttcaggagacgaactccctcatcttaatagttgaaaatagtacaaaagctgaaaaaatagagttagcgagaatttttgaaaaagactactcgagtaaaggagagggccgcggtcttggcttgtacaagatccaacaattactggaaaagtatcccaaaacgacagtgtctaccaagagttcaaactaccgatttactcagagcctgaccttttggaaggaataatagaagagagagtgggacagaaatcggtaattcgttagaattcgatttcgtcgtcccacctccgcacagttgagtagggctgtaaaagctgatgaaatcagcgtagtagagcccactcaaccactgcgtcttgctcgacaatcaaaaataattgagaggctaggacttttgttccagcctcttttttgaccattcacgacgattttctgaccgattctgacagagagctacaaagactgtccctttgaagtatactgtatacaagatcaataagaaaagagggatcgtatgtttcaggtagcatctattacaaaatcatttaaggagaaagctgtattaaagggagtgtctttttcgatagaagaaggagacaaaattgccttgctgggaaataatggggcaggtaaaagcaccctgttcaatattatcgctggacagctccaggccgattcggggacgataaagacttcgcttgattttcaaagggaaattgggatgatgcctcagggggatctgctcatcgaggatttaacccttgctgaattcgtcgaattaaaaagccggatgaatcagctgaagcaggctgatatcaatggactcttagagatggtcgaattgagaggctcaaaagagcagatggtgggaagtctttctggtggtcaaaagagacgcttgtccttgttgttaaccattttgaatcatccaaggttgatttttttagatgagccaacaactggtatggacttggaagcagtagataatttttggaaattgctggagcagcaagagtttacatctgttgtggtgacccatgatttcaaccaaattgatgccttttttacaaaagtcctgattttaaaagatggtcgaattgctgccacaaaggctgttgaggatattcaccaggctggtcaaaccattgagcagtatttccgagaagagatgaataaaggaggggaacaagcatgagaaagattcaattaaaacaagttttacgaaataagcgctttgtattattcaccattattttacccataggctggtatatcttcttttatcagcttcaaaaaggagtttcgccaagtattttattaggcattgccgtctttatcggcgtcattggcaatagccttgcaacctttagtaagcgaatcgcctcagatatcgggttttattcttttgaatcccactttacaagctatagtgtcaagaactatttatgggatcaaagcatcgtacaactgattctgaacagcttgatctttttagcagtactagtagttgctgttctaggttttcactttccggtgacgactagcctgttggtgcaatttttcctcttatccttgatggggatctactttagcgtgattggctttgttcttggggtaagagtagatgccaagacgattgataccattggctttcctgtcattattttggctgctatgaccattattccctttgatacgcttggcgcaagtggaggatttatggacctggttggcaagctacaacgggctttcccaggctattattatacaaagctgatccaagatttgactgagaaacaaacgatcgatgtccctcaattaggactctttgttgccgtatttggattgaatttgctatttttctacttgctagtacccaaaggggaaatggggaactaagagcagttaaaaagagagtgggacagaaatcggtaattcgttaaaattcgatttcgtcgtcccacctccgcacagttgagtagggctgtaaaagttgatgaaatcagcgtagtagagcccactcaaccactgcgtcttgctcgacaatccaaaaataattgagaggctaggacttttgtcccagcctcttttgtgcataaaaaaatgccccctacatggatttggaaaggattttcatattgagagtaattaaaaatattgaaatataagtgattttagggaaatacttttaggtattttcaatgtcatgatttaaaaatggggcaaaagtggggcaaaaacgaatgactctcatttggtttgaaaacctataatatctaatgattatgctatactagaaatatagtgttgttatcaataaatatcagtgcgagactaatcggaggataaaatggaaaaacaaattaatgaaaaaattatcgaaatggatagggaatatccctttttattttgctttaaatcagatttttggatggaatagtagatgataagacaaaatatctttgaagatacaaaaagacaaacgccaaaaatgacgtttgtctacgttctgaggtagcctttaggctcccttttttcttagaaaatatcgatgagtaattgcatgccaagactagtcaggatgatagcgatccagcaaagggctccaagaagaatggattttccactggatttgatcatagcaacgaggttagttttgagaccaatagcactcatagccatgatgatgaggaatttggagagctgtttgagaggtgaaaagaagctattgctaacaccaaaagaagtaaggacggtagttagcagagaagctaggatgaagtagagaatgaaaacggggaagatttttttaagctttactccttggttgttgtcttgttgacggctttgccaataggagaggaagagagtaatagggataatagctaaggtacgagtcagtttgacaatggttgcagattctagagtattggtatgatacagactatcccaggcgctagctgtggctgttacagaggaagtatcgttgaccgcagtacccgcaaagagagcaaaaccttcgttggagagatggagccaagaacctagagttggaaagataagagctgccaagacattgaagaaaaagatgacagagatggcttgagccacctctttttctttagcatgaatgacaggggctgtagcagcaatagcagaacctccacagatagaagagcctaccccaatcaaggtagctagctttgtatccatgttaaaaaatcgttggaaaaagaaagcaataattaaagcgatagaaatagtcgaaaggatgacagggagggaagattttccaactgcgaaaacttgagagatattgagtccaaaaccaagtaagataacagcatactgaagcaattttttggagctataagtcaaaccagcatccagttgtttatagggagtgagaaaggggtagagaatcattccgataaaaatggcgaaaacaggtgctcccacaacaggcagaaagcctcctaaaacccaagagatgatagaaatgatcagacagactaacagtcctgcccaattttttgatagaaatgacataaaaacctccgaaaataaatactccttattataatcttatctgtcagaaaagtaaaatagaaattaggaataaggttgtaaattaacggaattttgcggtcagagagcttttgtagtttaatagatatatgttctttgatcaataaggatgcaaatgtggcatatgttattgaaaaaaatgaatttgatgagcctggatatgtgaagtaattatgtgagataagaaaataaataagagagttgaaaatgtactgcaccccaaaagttagacagaaaaaatctaacttttgggatcagtacatatcctcgctttttttaatctaataggtccttattttcaattaagagttctagtggggatttatctcttgctacaataaaaccaggttcatattggttatgaaatgttcttttctgagaagttggatcaatatacaactcatctccatcttctgtgtatagctggttgcctcttgttaggtaaagtaaatcctctaagtactgtccatcagtttgtagaaaatgttcgatgtatttgacagcctttaagatctcacttactttatcagagtattcattcgattcaagaacactcttttctaattcaatctccttactcgttccaaaaagttgagttggagttgcattaaaatattctgctatcttatctaaatttgcaaaggtggggtagcttttttgtttttcgtagtcagagatggattgtttaccgattcctaaatcttccgcaagttgagtttgactcactcctttttctatgcgtagtcgtgccaaattgggtccaaaattttgaataataaaggtcatgatgaactcctgttttttattttaaacttattctatcacctataaacttacaaatcaagtttttaattgacttccaaaaatattttttataaaatatgtttataacttaaaaataagttataaataatacaaaatagttcatctgtttaggaatagtgagtgaggaggaagttgaagacgagactatgacttatgactattcgaagccttggagctagaaattgtgtggacaaggacaagggacgagcctgacgggaagtcaggcgaagtcctgcagactgccgtccagacaatttctagccaagcaaaaactggctattctaacagccagcaaaaaggtacacttaggacaacgtccaaagaacgacggaacgagcaaacgttgatttgacggtgtttctgagacctaaaaaatctaaaagaaggggggacaattttgttggtttctatacaagatttaagaagcattcaagaacgatgtgaaataggagaattagtacagaggttagatgtcagtattgatagattaacggttatctgggatacagacactggttccctaagacgaattttcaaaaatctgaaacaggcaataagtacaagagttgactcatttgaaatacatgataacgtgcgagatgatgtctttactttagctaaagattttaatgagtatgattcaatcaatattatattttttcaattatccacttatggaggtgaacaattgattcggattgatttcaatcctaacactttaaaagaatttgatggaatgaaagtatggaggcaattaatgtactttgccagattgaattcattgacggtacgtttgtctcgttttgatttggcatttgacattctcaacaggcctgagatcgttaatttgcaacatattaaaggtggtgttacccataaggtcttctatggtcgagggggcgaattagagacgaaatattggggttctagcggtagtaatgtacaagttaggttatatgataagaataaagaaatcattgctcacaagcgtgaagagaagctagatttggctgtaaatccgttttggtggagactagagttccaactcagaaccaaagcgattggtgaggagatggtccaagatattatgagtagacttgataatttcggattttataagctagaacatattcgagtggagcaaagagcatttacaattatctttctcaacaatcctgaactgttgtcattggcttttccaaatttaaaatcagatagcatcaaaaagaaaaaaacaagagtccgcaaactattgagagaagaaacgaaccaatttgcggaagaattaaaagaagtattaatacagaatctccctaaattaaatacagaattacaactgcttgtaggcgagtttctgaatttagaaaataaataaggaggataactatggatcataatttaattagtaacaaagaattaattgaaatgggctatcgccctcacactgcaaatgatattatccatcaggcaagagaattacttgtatcacgaggttatacattttataatcgtaaacgtttgatggttgttccaaaaagtgttgtaaatgagattctaggaacagaggtggcgtaatatggcaagtgttcgttatcgaaagcgaggagatagtaacttatggacctatgaaattcgtaacgaaggaaaaactgttgctcataatagcggttttaaaacaaaaaaacttgcagagtcagaagctgagccgattctgcaagaacttcgtttagggaaaagaatttctagagatatttctcttgtcgatctctatcaagaatggcttgaactaaaaattctaccgagtagtaggtcggaagagacaaagaaaaaatatcttctccgtaaaaacacaattgaaagattatttggaaataaaaaagtcactcaaattcgtgcgagtgaataccaaagaataatgaataagtatgggcaaacagttggtagaaattttcttggtagattgaatactggaattcatcagagcatccaaatggcaattgcagacaaagttctaatagatgattttacacaacatgtcgagttattttcatccaaagaacaacaggtgacagaagagaaatatttacatacagaaaaggactatctggatttacttttagcagtaaagagaaaattcgattaccaacgttcaattgttccttatatcgtctattttctattaaaaacaggcatgaggtttggagagttagtagcgttaacttggaatgaggttgattttgacagaggattgttaaaaacatacaggaggtataatactctctctcataagtttgttccaccaaaaaataaaacgtctattcggatggttccaatagacgaagagtgtatcaaaattttgcgccttttacaaacggagcaagaaagagcaaacatggagttaggaatcaaaaatcgatatcgaatgatctttcaacattttggatatattcattcagttccagatattgcaagcgtcaataaagctttgagtgttctcttaaatgagttggacatttatccaattatcacgacaaaaggagcacgtcacacctatggaagctacctctggcacaaagggtttgaccttggagttattgcaaaaattctagggcatagagatatttcaatgttggtagaagtatatggacacactttagaagagaaaatttttgaggaatttaatcaaatcagagatatctggaaagattgctcataaaaaaatgtggggcaaacgatggggcaaatgctcttaagacaagcaaaaaagccttggttatcaaggcttttactgttgaagtttgatgccccctacagggctcgaacctgtgacccatagattaagagtctactgctctaccaactgagctaaggaggcaaatataaaaagctgtattggtgccgaaacttcacgatttgtattgaacccgcgcaattaagcaggtgggcaactcgctctgacttagctgcttccgcgtgaaacggcctgcatactgccagaagtcttttgtttccctaataatacaaaaaatagtcggtcaacacttaagtgtgaagtcgtacaccacagcgtttctatatgtatatgataccacattttgaaaatatttcaagggaaaatctcaattttttgaaaccgatgtcactttttcttaaattgatcaatcttctccttggtggctccgagagcacgctcgtacttgccgttttcattgggaataaagtaggacgcgtgtttgagcttgtctggcaggtagtcctgattgacccagttgctagggtagttgtgaggatatttatagttttgcgcatttcccagttccttgcttccagcataatgaccatcgcggaggtggcgaggaataggaaggttgccagaacttctaagatcagccagcgccttgtccatcgcaacgtaggctgagttggatttaggcgaaagggctagatcgatgacgatgttggcgatgagaatgcgggcctcaggaaagccgatgcgctcagctgcttgaagggctgttacggtatgaatctgcgcatctggattggccagaccgatatcctcataagcgatgacggtcaagcgacgagcgaggctgggtagatctccggcttcgatcaaacgagcggcgtagtggagactagcatcgacatccgaaccacggatagatttttgcagagcagagagtacatcgtagtggccatctccatctttgtccatggtgatatagctgcgctggaggctgttttccatgatctctagcgtaatatggcgaatcccttctgcattttcagaggtcgacagcaccgccagatcgagagaattaaaagcagagcgaagatctccattggtcgaggtagcgatgaaatccaaagcgtcctcatcgagaacgacaggaaagtcaaagccacgctcgggatcatctaaggccgttttcagagcttgcttgacctcctccgtcgtcaacggttccagctcaaagatctgtacgcggctacgaatagcgggtgtgacagagaaaaagggattttcagttgttgcaccgatcatgatgaccagaccgctttcgagcaaaggcaggagaaaatcttgcttggttttatcaaggcgatggatttcgtccaaaagcaggaccaaaccaccagaaaatttggcttcctctgcgatttcttgtaggcgttttttactgtcaaccgttgcattaaaggtccgaaaagcatacttggtcgttcctgcgatcgcagaagcaatactggtctttccgatccccggaggtccatagagaatcatagaggacagacgattggcctcgaccatacgacgaatgattttgccttctccgaccaggtgctgttgaccgatgacttgatcgatcgtccgtggtcgcatacggagtgcgagattgtcgggcatttccttctcctttctagctttgtctcctttcaaagaggcagtttttatggtaagattgtagtaactattgtaacatattccgctctaagagtgggaaattagaaagaggacgctatgtctaaatacggatttttggatattttagaagaggagatggacaaggtttttccttttgattttgagatcaattgggataagaaaaaccatgcggtagaagtggcttttctcttggaagcacagaatacgggaggggttgcactggttgatgaagctggcgaagaatctgatgaggatatattctttgaagaagctgttatcttctacaatccagccaagtctcatgtggaggaagatgcctatttaacagcgattccttatgagcctaaaaaaggcttgtcacgtgaatttctagcttattttgcgactttcctacgagatactgctgagttggccttggatgagctcatggatttcttggcagacgaagaagcagagagctttgagatcgtctggaaccaagaagtttttgaagaaggcaaagttggcctagaagaaagcaccttttatccctatccgagatattaggagggaaagctcatgcttgaggattgcttagaagcacggttcgaatttacgggttgtaaaattgccttgatttgtgatgggcaaattttgaccatcttgcgcgatgacaaggaggatattccctggcctaatatgtgggaattaccaggtggtggtcgggaaggaaatgagaccccttttgagtgtgtggcgcgtgaggtttatgaggaattgagcatccaactgtcgaaagccgatgtgatctggttccagatctaccccagtatgctagatggaaataaaaaatccgtctttttagttgggaggtttacacaggaacagttcgaaagtatcatcttcggagacgagggccagggctataagttagtgagctttgaagaatttttaacttcagatcgagttgttccccaattgcaagaacgagtgagagaatatatggaggaaagtttatgataacacttgagaaagcaggagcagaggatttagaaaccattattgccattcaaagagccagttttaaggcagtctatgacaaataccaagatgaatatgatccctatctagaagatcgcgagcgaatcaaatggaaattagttgagcggccccatagctattactactttgtaaaagaaaacgaagagaagattggttttttacgaattcataccaatgaagagttaacggaagcttggttggggactgcagcgattctgcctccgtatcagggaaaagggtatggatctgaaggattacgcttgctagaagaggaattttcaaccgttagacaatgggatttgtgtacggtgtttcaggatgcaggcatggtcgccttctacgagaagaatggctatcatcaaacccatatcgagcctgaaaaagaaggcatggatatggtctacatgaaaaaattgatagagaaatagaaaggatggttcggttaaatttctaaactgaacccgccctaaacactgtgccaaaaaggtaaacttctcatagatacaagtgtcttcagagagtttcctattttggctttgtattttatgggcttggtatcttaatgatggaaacatggcaagagttaaaagtaacggtgaagcgtgagggtgaggagctagtctctaatctcttgatcgagttaggcgcccaaggagttgcgattgaagacagcatggactatgtgggaaatgtcgaccgtttcggtgagattttcccagaggttgtgcaacaagaagaaatcgtggtgacggcctactacccggacacggttgatgtagcagcggttgaagcggatttgcaggctcgtcttgcagaattgaccgactttatggatttaggagaggtcaagatgggaacgactgccttggctgaggaagactgggccgacaactggaagaaatactatgagccagctcgtatcacccatgacttgaccatcgtgccgtcatggacagactatgaagcgacggctggagaaaagattatcaagctggatccagggatggcctttgggacaggaacccacccaacaaccaagatgagcctctttgccttagagcaagttcttcgtggtggggagacagtgctagatgtggggacaggatcaggcgtcctttccattgctagctcccttctgggtgctaaggaaatctttgcctatgacttggatgatgtagcggttcgcgtcgctcaggaaaatattgaactcaacccgggcatggaaaacatccatgtagccccaggcgatttgcttaaaggcgtggagattgaggcagatgtcatcgtggccaatatcttggcagatatccttatccatctgacagaggatgcttatcgtttggtcaaggacgaaggttacctgatcatgagtggcattatcaaggacaagtgggacatggtgcgtgagtcagctgagtcggctggatttttccttgaaacccacatgatccaaggggaatggaatgcctgcgtcttcaagaagaccaaggatgtctccggtgtgattggaggctagcatgcagcagtattttgtaaaaggtttggctagctcacctgtcgccattgaggacaaggaaaccagcaagcacatgtttcaggtcatgcgcttaaaagaagatgatgaggtgactttagtctttgatgatgggatcaagcgcttggcgcgcgtggtcaatgtagaagcccgtcagttggagctaatcgaggaattagcggacaatgtggaactgccagtccaagtgaccatcgcatcaggctttcccaaaggagacaagctggagtttatcactcaaaaggtgacggaactgggtgctagccaaatctgggcctttcccgctgactggtccgttgccaaatgggatggcaagaaattgggcaaaaaggttgagaagttagaaaaaatcgcacttggagcagccgagcaaagcaagcgaaatttggtcccgagcataaccctatttgagaaaaagtctgactttcttgcacaactggaccagtttgaccgcatcgtggtggcctatgaagagtcggctaaagatggagaggtagcagctctgattcagtcgctgacagaattggaagctggaagtaaactactctttatctttggaccggaaggtggtctttcacctgcggaaattgagtcttttgaagctaaaggagcaatccttgcaggacttggccctcgtattcttcgagcagaaacagcaccactctatgctctcagcgccgtgagtgttgttacagaattaatgaactaacgaagtgaaggaatcacttcgttatttttttttacaaaaatcttctattttcaaaaatttttacgaattataaaagtaaggagaggatgcatatgaataaaaaagagaatagacgacgtttgatattttctgtgatagttgttggactcttgatctgggttgggtcaaaagtaaaggatcatctagaattccaacaagaaatggtccgaattgtacatagtaatgaagtaaaggagttgattgtatatgatttgaaacagaaagacccggaggcgtttacagatcaaggcaagatccaatcgtatgaaatcgatgatgaaacgatcgaacacaatccaatgggagggattatgtttgaggtgattataaatggaaataaaaaaataacaggtagtatgggattgtggaaaagtagtgaagatggccctattgagtctgtagggatggatacctctgtaggtcttcaagaacttatggaagagtaagcttgatatttgcggggaaatcaatcatcaatgggagaaatcgggttgtttatttagcttttttccaaattttcttccaaattattaaagtaagagtaataaatttgaaaactaaataatgtaaagagatacgactaggaatttatgaggatggagatgaaaccaaaaataaaaaattgtcgttatatatttggagtgttgctattaggaattttgatatggttaggtttacttgtaaaaaaccatcttgaatttcaacatgaaatggttcagatcgtgcatagtaaggaagtggaaaagataatagaagcagaactgaaggaattggacccaaatgccttaacaccaaaaggtaagatccaatcgtatgaaattaatgatgaaacgattgaacacaatccaatgggagggattatgtttcgtatcatcattaatggagacaaagaaataaccgaaaattttggattacgaaaagatagtgagaatgcaccaatcgaacaagtgggagtgagtaaatctgttgagtttcaagatctggtagaaaagaaatgatcatcaaaatatatgaaaagcatattcgattcgaatatgaaatatattttctttgagagctttgtatatttacaaaaaattttttaaaaggatcttttttgaaaatttttacgaattattaaagtaagagtaataaatttgaaaactaaatagtgtaaagtgatactactaggaatttatggaggatgaaaatgaaaccaaaaagaaaaatcggccgttatatatttggagtgttgctattaggagtcttgatatggggaggtctacttgtaaagaaccatcttgattttcaacatgaaatggttcagattgtccatagtaaagaagtggaaaaattgatagaagaagaactaaaggcaacagatccagatgccttgacaccaaaaggcaagattcaatcgtatgaaattgatgataagacgatcgaacacaatccaatgggggggattatgtttaaagtaattataaatggaaataaagagatcactggaggtatgggattgaggaagcgtagtgaagacggtccgattagatctgtaggaatgtccgaatctaaagcgcttaggaatctaataggagataacaatggtaattaatgatgaagaaaagaatgatattgcatggcaggaatatactaaatacattgttggggatggtgtaaaaattgatataaataatcggaaaaaaacaataggctatgtttctgaaatttttggtcgaccaccagaaaaggatatggtcacctctcctcaagacttggaagcacggtttctaggagacatatctggtttaaatggttatattgtgacagataaagaaatcactcaggagaccagaccagaagatgtgcatgaagtaacaattttgtttgagggatcggaagctaaatttgatcaaaattttatgggagccttgagagactgggggctaaccgatgctccaactgcattacaaatatcaatggctaaaagactcgggatcaaaacggggaaaacctcccagcttgacgcggcttcgaaagaagtaaaagcagcaatggatcgatatccgaatgcgcgtttcaaattttatgctcattctttagggggcttaaatatccaatcttcacttggttctttggaggataaatatttagatagaattgatggggcttatatatatgaagcacccaacctttatccacagttaagtgatgcagaaaagaaacaggtcgataagattaaatataaaatttttaattttatagacaagcgtgacttggtcacatgggaacattctgaagaagggaatgaaggagttgttggaacacttgttcggattgacagtaaggatgcaggtggttttataaaacaacatatgtggggaggttacgactacaaggctggctacttgaatgtcaaagaagagagtttagatgattatcggttagctcgaataaagcagacaaaagaacaactgcagttaaagaaacaagcgctggagtcttggaagaaaagcggactctccggaagtgacctcatttccatggacaccattcaggcaatgggaatagtggagtcgctgaaggaatttgctctcatagcctctgattatattttagctgtctgtgatttcggtattgcagatataaaaggaacctgggagacattattagcttcttgtcgttcaactgtatcagggacccgttgtacagaaagtgatatcataaatgcacttgctcaaattggcgcaacgaaagaaacgattgagatgaatcgcattacagaattagaaaaaattaaaaaagatactctaaaaataaaagaaagtatttttagtctatcaacagacatggcgaaaggaattgcaactgtaataggcacggatgttgctctggcaagccaacttcaattgcaatggtaaagaatgggtaacaaagagattgaatacattaatgcgattagagaagtagaagaaaaatggaatggtactgaagaagaattaaaaatggagatgaaagaactagagaaaagaatgaatcatatccatgatcagtattgttttacaaaacaaaacattgaaatgatggaagaggaagtcggatatttctctaagatgatggataatacggaaattttatcggattattatcgggaattatcagatgtttatgaagaattgaatgcagagcactatcacgaactagctcatattgagcaattgcgtcagttaaaacaaaaagaattacagctagtctctgaaaaatatgcgaatgagattgcaaaattacgaaaggagatgtatgtcgaatattgatcttacaaatgatttaacatacgaagataagcgtttcatggcagctcttcttagtgttaaatttatgggggaaatagccttaacaaaggctactgttgatcaaaaaagcattaaaaagagaatttcatctagtttaacagaacttgaaagttctctagatcaggttattggaactattgattcggatttggctggaaaattttcaaactctgttaaagaaggggttggaagaaagaaattggagttaaacgctttgcaagagttttgtaagacaaagtagtatccgtatattaaagtagcttcattggttcccatctgcttctaaaagtgttaaaatagtatccaagaaactggagaaaatgaatgccgaaagaagagaatttaacaggggaccaagtcgttgcccttacaaaaaaatatttatcacctgaagatgttgcttttgtgcaaaaggctttggtctatgcggttgattgccatagtgggcaattccgtcaatctggcgagccttatatcattcatccgattcaagtggcaggaatccttgccaagctgaagctggatgctgtgacggtagcctgtggctttttacatgatgtcgtggaagatacggatgcgactttagatgatttagagcgcgaatttggtcatgatgtgcgcgtgattgtcgatggggtgaccaagctcgggaaggtcaagtacaagtcccatgaagagcagttggcggaaaaccatcgcaagatgctcatggccatgtctcaagatatccgtgtcattttggtcaaattggcagaccgcttgcataatatgcgtactctgaagcatttgcgcaaggataagcaagaacgtatttcgcgtgagaccatggagatctatgcaccgctagcccaccgtctcgggatttccagcgtcaaatgggaacttgaggatttgtctttccgttatttgaatgagacagaattctacaagatttctcatatgatgaaggaaaaacgtcgcgagcgagaagagttggtagaagaggttgtccacaagattgagacctatgctggggaacgccatctgcatggaaaaatttatggtcgaccaaagcatatctattcgatctatcgcaaaatgcaggataaaaagaaacgctttgatgaaatctatgacttgattgccatccgctgcatcttggatactccaagtgatgtttatgccatgctgggctacatccatgagctctggaagccaatgccggggcgttttaaggactatattgccaaccggaaggccaatggctatcagtccatccatacgactgtatacggtcctaaagggccaattgagttccagatccgaaccaaggaaatgcacgaagtcgctgagtatggggttgcggctcactgggcctataaaaaagggatcaagggtcaagtaaacagcaaggaatcagctattgggatgaactggatcaaggagatgatggagctccaagaccagtcaggcgatgccaaagaatttgttgaaaatgtaaaagaagacatcttggcagaagaaatttacgtcttcacaccagatggaaccgtgcgctcgcttccgaaagattctggaccgatcgattttgcctatgagatccacaccaaggttggggaaaaagccattggtgccaaggtcaacggccggatggtgcctcttaataccaagctacggacaggagatcaggtggagattatcactaatgccaactcctttggtccgagccgtgactggctgacccttgttaaaactagcaaggcgcgcaacaagattcgtcagttctttaaaaatcaagacaaggaattgtcgattacccgtggtcgggacctcttgatggcccagttccacgagcatgacttggtagccaataagttcatggacaaaaagcacatggataaagtgctacaaaaatcaagctataagacagaagaagccttgtttgcggcgattggttttggagagatcggggctattaccatctttaaccgcttgacggaggaagaacgtcgagaagaagagcgggctaaggcacgcgcagaagcagaagagctggtcaaaggtggcgaggtcaaggttgaaaataaaaaagacaccttgaaggtccgtcatgaaggtggcgtggttatccaaggagcttctggactcttgattcggattgctaagtgctgtaacccagttccaggagatgaaattgtgggctacattaccaaagggcgtggtgttgcgattcaccgccgagactgtatgaatcttcgcgctcaagataactacgagcaacgcttgatcgatgtcgagtgggaagacaataatacgaccaaggactacatcgcccatattgatatttatggactcaaccgtgcaggtcttcttaacgatgtgctccaagtcctctccaatacagctaagatgatctcaactgtcaatgcccaaccaaccaaagatatgaaatttgccaatatccacatttcctttggaattccgaacctatcgatgttgacaacagttgtggataagattaagagtgtgccggaggtgtactctgttaagcgtaccaacggctagtcggctactcagttatcttttactgcttggttagctcgtcgtctgaggttgatgttctttcaagcgcagcagtgaatgctcgatagatttataaaataggatagtaaaatgaaattagtgattcaacgggtcaagagtgcctcagtttccattgatggtcaagtctacaattcgatccagcaaggtttgctgcttctagtaggtgtcggtccagatgatgatcagaaagatttagattatgcggttcgaaaggtatcgcagatgcgtattttctcagatgaggaagataagatgaatctttcagtcaaagatatccaaggggaaattttgtcaatctctcaatttaccctctttgcggacaccaaaaaaggcaaccgtcctgcttttacagggtctgccaagccagatatggccagtcagttatatgatgcctttaatgatcaattagaaaaagaagtccctgtcaaacgagggatctttggagccgatatggcgattgaattgatcaatgatggtccagtgacgattttgctagatacaaaaaatccataagtaagaaagcatgcagtcggattagactgcatgtttttcgatataaagttgttgggcgatcacttggttgatagaaatttcttgtccatggataacgaagtgatagaggcctgtgtagtcatcgtaccgttgaaacgcgatggtatcaccaatttggagatggatctggtctaagaattttaacaattcataggtgtcatagaccctttgcagaatatacagaccaggttgggtcgtttcactgagacggtcttggtgggcttcgacaagcctttcgcctttctttggaattgtcccaccgtgagggcaggtcttaggattcccaagcatgtgatccagtcggtcgatgaaatgttcagaaacggtatgctcgagaacttctgcctcttcatggacttcctcagttgtgtagccaagattttccagcagaaatacttcgatcaagcggtgcttgcggtagagatcagagaccaattgcgagcccagatctgttagtagatagccatgggtcttatctttcaccaagaggtcctcagagatcatgcgcttaatcatctcggtcacagcgggtggagagacctgcatgcgactggcgatttccttattactgattttttctacttctgtgccaatttcataaatgcacttgaggtaatcttctttgtttggtgtcatgctttcctcttttcttcgctcacttctagtatatcaaaaaaatcctcaaaaacgctagtggagtaatgagaattgtctcaagctccaaaagatggtagtatagaaacatagaaaggacggcactatgaacagacgggaattagcgagactaggctggagagaaaatagtttagcctatctagagaagcacttgcagggatacaaagatccacaagcctaccaagaacaataccagtctgtctttttctttgccagtcctctgtttcaaaacatgtggtttcaagagatcaaggatctaacggagactgctgcccaagacttgctgaggggcgtcatgaaaattctcctaatgccaagtgacctgtctggaacttgtgaagaaacagcctttcttctgagtaggatggctccagattgtccgccaggatccgacttttggaagtctttttcacgcgtcgtgcaaatcgcttttaaaaaggatcacttagcagatcagtcgggagatcagctcttgaaacgccaggtccaccagttgcgctacctgctttcaagttaccaggcacaatggattcggatgcataatgcgagagctggacagactgacgaagaggccttacaagcttacctacaggaggctagagctgtcacggtggattcttatgcggctgctcgccttcataacaaggtctccctaaggccagatggtcaccttcattatccatcaggggcctcccaacaagtcaatttcaaggtcttgttaaattttcatacggagtatattctcgatcaagctgggcatttcctcaatgaagtcgatccagtagaagtttctgaaaatggcattgtcaatggtgccagttttaactacgggttggctaggggccggacccataaggacttagatattgaccccgtcaaagcttgggacccagcctttcgcaagcaggtcctctatcagcaaggtgttcgctatctagctccgaagaatgaccgcggtatcgagggatactggagtcgaaaaggagtctttgcacaaggaggccagagctacaagcaacaagtagcaagacgcgtgcgaagtttcctcagaggcatccctcgcttacgctggcgggtcctcctccagaatgggctccatcggattttatagcaacgaaagaactgttattttacataaaatagcctaagagattcttaaaagaagttaaaacagttaagttcttagagctgatctatcaggtgatgagcctttccgctgtgagaaaagtgcttgaaacattgttgtttcaagtactcgggagttttgaaacgttaggttcaaaactaattgaacacgggctgcggatcgtttcaaaaagataagttttcctagaatcaaaagattctgtgtcaaacttcctattttgactttatccgcgaacaccctttgtatcttaatttagtcatggaacttcctagaagttcgctgacgtccgtactcacttaaggaaaggttctgaacagattttgtagatatagaaaagaggtcgcagacctcttttttcgtttatccaagtactttgacggcttcgattgcagcgtcgtaatttggttcgctgttaatgttgtctaggtattcaacgtatgtgaccttgttatctgcatctaggaccaaaacagcgcgtgcgagcaagtgccattcattgatcaagaggccataagacttcccgaaggaatggtcgaagtagtcagagagcatgatggcattgtcgatcccttcagcagcacaccatttaccttgagcgaaaggaaggtcgacagagaccgtcaagacgacagtgtcttccaaatccgataaggtcttgttgaagtgacgtgtttgcatcgaacagatccctgtgtcgatggatgggataatgctgaggacttttttcttcccagcaaaatcagctaaagatttcttctccagagttggagtaatcaatgaaaaatcatgggcaatttcccctacttgaagttgagatccggtaaaggtaacagggtttcctaaaaatgttgccataaaaagactcctttttttgtttttattttatcgcaataccggaggaggggccactgatttgtttagaaatctgaaggggctactgactcaaaccttctgcgatcttgtctaagttccacttcatcatgctgtagtagctatcgcccttttctccttctttggcaatggaatcagtgaagatctttgcatagatcggaatattggtatctttagagacagttttcataggacgttcatcgacactggattcaacaaagagggccggcaccttggtttgacgcaatttctctaccagtgttttgatttgttcgggtgtcccttcttcttcggtattgatttcccagatataggcagatgggacgccataggcttttgagaagtacttgaaacagccttcgctggtcacaatcatctttttctcttctgggatgttattgaatgcttgtttggctttttggtctagcttgctgagtttttcagtgtaggctgctagatttttttcgtagaagtccttgtttttcggatctttggcgattaattgtttggcaatgtttttagcgtagaggatcccgttttcgagattgagccaagcgtgtgggtcttcttttcccgcttggttttggccttctaggtagatgacgtcgactccctcgctcactgcgaaatagtccttgttttctactttattggcatttttgaccaatttagtgaaccaagcattgccaccagtttcaaggttgatcccgttgtagaagatcaggtctgcttgtgaagtttttttgacatcttctggtagcggttcgtattcgtggggatcttgaccgacagggacaatactgtggagctcgattttgtccccggcgatatttttggtgatatctgcgaggatggagttggtggtgaccactttcaatttgccagaagctccagaagaagcccccttgctacaggctagaaggccaaataagagcgccacaaagagggcgaggaaagaagcgatttttttcatgtgtttctcctttaatgagatgaaagagcgtgcctgttctttctttgcttaggagctataaagaagctgatgagaaagaagacggcagaagtgaggacaatacaagacccgacggcgatgtttaagctataaccaataaagagtcccaaaatggatgcaagagcacctaagctagaggacaagagcatcatggaccagaggctattggcatagagataagccgtcgcagcgggtgtaataagcatggcgacgatgagaatggttccgacactttgcatagcagtaacagaaaccaaggtcaagagcaccataaggaggtagtggtagaccttgacccggacgcccatggattgagccaaaaccggatcaaatgaagtgagcagcaaggggcgaaaaagcaggacaatcaccagcaagaccgccaccccaataccgatggtcatccacatatcctggtcttgcacggccaagatattcccaaagaggatgtggaaaaggtcggtggaactttttgcgactccaatcaggatgactcctaaggcgaggaaagaagaaaaggtaatccctatcgctgtgtcgctcttgatgatggagttgctcttgatataggtgataaggatggaagctagaagcccaaagacaatggcgccaataaagaaattgataccaaggataaaggacagggccacccctggaaggactgcgtgcgagatagcatctcccatgagagacatgcctcgcaaaataatgaagcatccgaccgcaccggcgacgatcccaatggcaatagctgtaatgagagcgttttggaggaaatgaaattgttgtaatccattgataaattctgcaatcatctgatttcacctcctataaagagttcatgcccgtaggctgcatgcagattctctttggtaaaggtttcctccgtttttccgaaggcaatcagcttgcgatgaagaagcagaacttgatcaaaataagctggaaccttgctgagatcgtgatggacgatcaggatggtcttgccttcctttttcagggtttggagtgtctgcatgatgatgtcttcgctaacggagtcaattccagcgaagggctcatccaaaaagatgacatccgcttcttggaccaggcagcgggcgattagaacccgttggaattgccctcctgaaagctggccaatctggcgatccgctagatcaaggagattgacaagttttagggcatcttccaccttttggagatcctctttgctttttctcttgaaaatagaaagatgggggtagaggcccagtgagacacactctcgcaccgtgatggggaagtggaaatcaatagctgtcttttgttcgacgtaggccactcgttgaagaacttggccgagatctttttgatcgagcaggacttttcccgaatgagggagaagtcctagcatagccttgatcagggttgattttccagctccgttggggccaagaattcctaggatggttggcccctggatggtgagggaaagatcctccaaggctagtgtttgctgataagcaacacttaaatgttcaatttgaatcatgattttgctcctttaccattaatatacataaatttaaaaattaagtcaagttaatttttaaaataatttagattaacttgcttgtaatcattgaaaaatagacctatttttgataaggttaatagaaaagaatgaaagcgagaagatcatggtacgtttacaagatgatttttatgattacgtcaacgggaaatgggctgagacagccgtcatccctgatgataaaccgtcaaccggtgggtttatggacttgatccaagagattgaaaacttgatgttggatattaccggaaaatggcaacggggagaagacttacccgaagacagcattctccaaaactttgtcaaataccacaagatggtggcagattttgaggcacgagatgcagctggtgtggctccagctatgcccttgatcaatgaaatcaaggccttgtcttcttttgaagactataccagtaagttaggcacctatgagctagctggcaaaccaaatctcatgccatttagcgtgtcaccggactttatgaatgcccaaatgaatgtcttgtggggagaagcactcggtttgatcttgcctgatacgacctactatgaagaaggcaatgaaaaaggcccagagttattggctgtttggcgtcaaatggttgaaaagctcttggcaaaatttgatttctcagaggaggaaatcaaagacattctggataaagtgattgcggcggatgcagaattggccaaatatgtcttgtcaaacgaagaaaaatccgagtacaacaaactctaccatccttatgagtgggcagatttcaaggccttggttccagaattgccactcgataccttctttacagaagtgatcgggcaaacgccagatactatcattgttccagaagagcgcttctggaaggaatttgcgccaaaatactactcggcagccaactgggaaaccattcatgccaaattgaaactcagtgcagctctttcttggacgtctttcttgactgaagaaatccgtgtcttatctggtgagtatagccgtacgattacagggacaccagaagcccgtccgaaagaaaaagccgctttggctttggcagaaggaccttatagccaagcacttggcctttggtatgcaggagaaaaattctcaccagaggcgaaagcagacgtagagcataaagtagcgaccatgattgaagtctacaaggatcgcttagaaaaagcagactggctcgctcctgaaactcgtgaaaaagccattgtcaagctcaatgttatcacaccacatatcggctaccctgaaaaattacctgaaacatacgccaagaagatcatcgacgaaagcaagaccttggtggaaaatgctcaaaaattggctcaaatttccatcgagcatgtctggagcaagtggaaccaaccagttgatcggagcgaatggcacatgccagctaatatggtcaatgcttactatgatccgcaacagaaccaaatcgtcttcccagcagcgattttacaggcacctttctatgaccttcaccaatcatcatcagccaactacggcggaatcggtgcggtcattgcccatgaaatctcccacgcctttgacaccaatggagcatcctttgacgagaacggtagcttgaaagactggtggaaaccagaagattacgaagcctttaccgctcggactcaaaaagtcatcgatcagttcgaaggccaagattcatacggtgctaagatcaacgggaaattgactgtttctgaaaacgtagcagacctcggcggtatcgctgcagctcttgaagcagcgaaaaaagaggaagatttctcagcagaagaattcttcactaactttgctcgcatctggcgcatgaaagctcgtacagagtacatgcaactcctcgcaagtgtcgatgtccacgcaccaggaaaactccgtaccaatgttcaattaccaaactttgacgaattctttgaaacctttgatgtcaaagaaggcgacggcatgtggcgcgcaccagaagaccgtgtgatcatttggtagtctaagatactaagcccgtaaaaaaagcgagaagaaaataggagattgaccatgtgggccatgcccaccaggcaatctctctttttctttaccgtgagtgaaagaataaaaaatccccacagccatgtttcaacctactgaaactagctgtggggatttttgagtggattagaaataacaatggatgtcatgatctaaaaaaacttgctggtagtcatacaagtcttcggggtgcagagcctttattccttccatttcataacgacgtcctaatagtttgtatttattctcaccaaactggtgaaatgggagaagttgtacttgatcaatatctaaggagttgaaaagagtggaaaattcttctgcatcggctaaagaatcattaaactgagggatcacaggtatacgtaaaacaatcttttttttctctttaaaagcgtaatggatattttcgatgattaaactattatgaacaccgactttctttttgtgtttgaggctattgtagtgcttcaaatcggtataaatgaaatcaacatattggatcaggtcaataaatttttcgtgttccacaaaagcagttgtctcgatggcagtatgaagacctctctctttagcagctttcagtagtgcttttgcaaattcgaattgggcaaatatttcaccaccagataaggtcataccgcctccagattcctcatagaaatcaatatctttcatgacttcatcaataatttcatctactgttttttcttgtccagttgttccgggagctttagtaaccgcatcaagcatcggttcagggttcattcgctgtgattcgggattagagcaccacggacaacgcaaaggacatcctttcagaaaaacagttgttcgaattcctggtccatcatgaatactgaagtgttgaatattgaaaataataccgcgtgtcgttcccatatctatttctccttcttgctgatatttgtattatatatttttttagaaacaaaatcaattacgaatgaaacttttctcccttatattttttaagaaaatttgataaaatagagaagaggtaagaaatatgaagcgtttagaagaaattttaaaactagtttcgcaatatgaaaaaattgatgtcaatacactttctgaaactttagaagtctcaaaagtaacgattcgaaaggatttagataaattagaatccaagggtcttcttcatagggaacatggttatgctgtattaaatagcggtgatgatataaatgtccgcttgtctttccattatgataccaaaagaaaaattgcccaagaagcagcaaaattagtacaggataacgaaactattctcattgaatcaggttcaacgtgtgctctattagcggaagaaatctgtcaaacaaagaagaatgtgaagattgtgacaaattcttattttattgcagattttgttcgaaattatgactcttgcaaaattatattattgggaggagagtttcaaaaagactcccaggtgacagttggtcctttgttgaagcagttaatccaatcttttcgtgtaaaaaatgcatttattggtgcagatggctatgatgacgcattggggtttactggtaaagatatgatgcgtagcgaagttgttcaatatatgtctcaggtttctgaaaatatagtgatcctgacagattccagcaaatttcaaaagaagggcaatgtcagaaattttgccttgtctcaagtacaacgcgtgattacagataaggaaatatcatcagaggcgatgagaaaacttgaacaagcagggatatcccttaccatggtatagttaggagaaggattgtgaaatatgaacgcaaaaaactgttagctaagcttgcttatctatactatattgaagaaaagagtcaatcggaaattgctactgaaacaggaatttatcgaacaacagttagtagaatgttgacagaggctaagaaagaagggattgtcaaaatcgagattgagaatttcgatagtaaactgtttcgtttagagaattacgtcaaagaaaaataccatctgcatgaattggaaattgtccctaatattgcagatgagtctttgaaggatttagaacaacgcttggcccaatcgattgctagtatggttcgctctcttttacaagatggaatgaacatcggtttttcctgggggaaaagccttagtcttcttgttgattgtattgggagtaagcgtctagaaaatgtatacttctatccattggctggtggtcctagccatgttcatgctcgttaccatgtgaataccctcatttataatatggctagcaaatttcatggagagtgtcgttttatcaatgcgacaatcattcaggaaaataaggaattggcagaaggaattctcacttcaaaatattttgatgacttaagagacagttgggaaaatttggatattgcggtagtaggtattggtggccctgctgatacacataatccacagtggtttgatatgctaacagaaaaagactttacagaactcagatctgaggcagcagtcggagaggtttgttgtcgatttttcgatcaggaaggaaaaccagtgtatcaagatttacaagaaagaacagttgctatcagattggaagaattgaaacaaatcccaaaaacagtttctttggcatatggagaaagaaaagcgggggcaatactatcagtgatcaaagctggttatattaatcatctcgtaactgacgaagcaacgattataaaaatgctagaattggatggagatgctaattttttagaataataagaagattgcttacatttgtgggcagtttttttataaggtgtaatagcacaaaagtgcaacaataataaaaagacaaacatatgtttcaaaaatcgttgacggtgaaagataaagatgatatattgttgttagaaataaaaacgctttcaaaaagtaaaggaggcttcgttatggaagtcattgttgcggaccaaattattatgggattgattttaaatgcgggtgatgctaaacagcatatttaccaagctttatcatatgctaaggagggcgattttacatcttctgaaggcgaaattgcaaaagcagatgcagcattgctagaagcgcataacctgcaaacacaatttttagcccaggaagcaggtgggacaaagacagagattacagctctgtttgtgcactcacaagatcacttaatgacttcaatcacagagattaacttgatcaaagaaatgattgacttacgtaaagaactttcagcgaaacaataaggaggaaaataagatgaaaattggattgttttgtgcagcaggattttcaacaggaatgttggtaaataatatgaaggtggcggctaaggaattagggattgatgctgaaatcgatgcctattctcaagcgaaattagcagattttgctcctgaaatcgatgtcgctttgttgggccctcaagtagcttatactttggataaatcaaaagcgatttgtgaggcaaaccatattcctattgctgtcatccctatggcagattatgggatgttggatggtaagaaagtactaaatctagctctagaattgctaggagaaaaataaggaggcttcccatgtctaattttaattctcagaaaattatcgctccaatcatgcggtttgtaaacttgaaaggaattattgctcttaaagatgggatgttagcgatccttccattaacggtagttggtagtttgttcctgattattgggcaattaccatttgaaggccttaatcaggctattgctagtgtatttggcgatacgtggacagagccatttatgcaggtttattcaggaacattcgccatcatgggcttaatttcgtgcttctccattggttattcatatgctaaaaacagtggagtagaacccttgccatcaggagttttgtccctatcttcatactttatcttgttaaaatcttcttatgtaccagctaagggagaaccaattggtgatgccattgcaaaagtatggtttggtggtcaagggattatcggggctattattataggtctggtagttggtgcgatttatactgtgtttatccaaagacacattgttattaaaatgccagaacaagtacctcaagccattgccaaacaatttgaagcgatgattcctgcttttgtgattttcttactatcaatgattgtctatatcgtatcaaaagtagtgacaagtggcggtactttcattgaaatgatctatgatgtcattcaggttcctctacaaggtctaacaggatcactttacggagcgattggaattgccttctttatttcgttcttgtggtggtttggtgtgcacggacaatcagttgtcaatggtgtagtaacagccttgctactttctaacctggatgccaataaatcaatgttggcagctgggaagctatccgttgaaaatggtgctcacattgtaactcaacaattcctagatagtttccttattttgtctggatcaggtataacctttggtttggttattgctatgttatttgctgctaagtcaaaacaatataaggcacttgggaaagttgcagcttttcctgcaatcttcaatgttaatgaacccgtcgtatttggttttccaattgtcatgaatccagtgatgttccttccatttattttggtacctatattagcggctgttgtagtgtatggctcgattgcgatcggctttatgcaaccattttctggggttactctaccttggagtacaccagctattatctcaggatttatggttggtgggtggcaaggtgccattgtacaggtaattgttttaggaatctcaacgcttgtttacttcccattctttaaattccaagataaattggcttatgcgaatgaactagaagccgaaaaatagtgtcctaaaagataatggcacatatgtgctgttttagatagaactagctattctacagagtatttattgaatttcaaacgattaaatgctactatagttacgaaagaaaacaaaataatttcaaaagaaaggtttatcaaatatgacaaacacagtagaagtagcaagaacatctatcaaaacggactattttggtagtctaaccgatcggatgaacaaatatcgggaagatgtattgaataagaaaccttatattgatgcagaacgtgctgttttggcaacagaagcctatcgggaacacaaggagaaaccaaatgttttaaaacgggcctatatgttaaaacagattcttgaaaatatgaccttgtatatcgaagatgaaacgatgattgttgggaatcaagcctcttcgaataaggatgctcctattttcccagaatatacattagagtttgtattaaatgaattggatttatttgaaaagcgtgacggggatgtcttctatattacagaggaaacaaaagatcagctaagagcaattgcccctttctgggaaaataataatctccgtgcacgtgctggagcacttcttccagatgaagtacaagtctatatggagactggattctttggtatggaaggaaagatgaattcaggggatgctcatttagctgttaactatcaaaaacttttgcagtatggtttgaaaggtttcgaagagaaggcgcgtgaagcaaaagctaatcttgatttaacagatccttcaagtattgataaatatcatttctatgattcgatttttatcattgtggatgcagttaaaacctatgcagagcgttttgtgaagttagcaactgaaatggcagagacagcaggtcctgaacgtcgaaaagaattattggagattgctcgtatttgttcgaaggttccatacgaaccagcagaaacttttgcagaagctgttcaatctgtatggtttatccagtgtatcctacagattgaatcaaatggtcactctttatcatatggacgttttgaccaatacatgtatccttttgtaaaggctgatctggaagcaggtcgtgaaacagaagcaagtattgtggagcgtttgaccaacttatggatcaaaacaattacaattaataaagtccgtagtcaagctcacactttctcatctgcaggtagtcccctttatcaaaacgttaccattggtggtcagacacgggataaaaaggatgctgttaatccattgtcttacttagtattgaagtcagttgctcaaacccatcttccacaaccgaacttaaccgttcgttatcatgctggtttggatgcccgctttatgaacgaatgtattgaagttatgaagcttggctttggtatgccagctttcaataacgatgaaattattattccatcctttattgcaaaaggcgtgcttgaagaagatgcttatgattacagtgcaattggatgtgttgaaactgcagttccagggaaatggggttaccgttgtacgggtatgagttatatgaacttccctaaagtattgctcattacaatgaatgatggaatcgatccagcatctggcaaacgatttgcaccaagtttcggtcattttgtgaatatgaagtcatttgatgagctaaaaactgcctgggataaaacattacggtatttgacccgtatgagtgtcatcgttgaaaatgcaattgaccttgctcttgaaagagaagtaccagatatcttgtgttctgctttgacagatgactgtattggtcgtggtaaacaccttaaagaaggtggagcagtctatgactacatttctggtcttcaagttggtattgcgaatctatctgattctcttgcggcgataaagaaattagtctttgaagaaggacgactaacaccgcaagaactctggcatgctttagaaacagactacgcaggtgaacgtggtaaagaaattcaagagatgctgattcacgatgctcctaaatatggaaatgatgatgattatgcggatcaattagttacggatgcttatgatatttacgtagatgaaatcgctaaatatccaaacacacgttatggtcgtggtccaattggtggtatccgttactcaggaacttcctctatttcagccaatgtggggcaaggacgaggtactttggcgacaccagacggccgaaatgctggaactccattagctgaaggatgctcaccatctcataatatggatcaacatggaccaacatctgttctgaaatcagtttcaaaattaccaacagatgaaattgttggtggtgtattattaaaccaaaaagtaaatcctcaaactttagcaaaagaagaggataagttaaaattaattgctttactccgtacgttctttaatcgtttgcatggataccacatccagtataatgtagtttctagagaaacgcttttggatgcgcaaaaacatccagaaaaacaccgtgacttaattgtacgtgtagcaggctattcagctttcttcaatgtactatccaaagccactcaagatgatattattggacggacagagcataccctatagtaaagaggtttgtttatggaatttatgcttgatactttaaatataaatgaaataaaaaaatgggctcgagtgttaccccttgctggggtaacctctaacccaacaattgccaaaaaagaaggagaaatcgacttctttaaacggattcatgaagttcgggagatcattggcgaagctccttctatccatgtgcaagttgttgcgaaagattatgacggtattttaaaagatgctgcgaaaattcgacaagaatgtggcggaaatgtttttattaaagttccggttactcctgaggggttggcagctatcaaaacattaaaatcagaaggttataaaattactgcaaccgcaatttatactgtatttcaaggtcttttggctattgaagcaggcgcagattaccttgctccctattataatcgaatggagaacttgaatattgattcagcacaggtaatagcacaattggcagaagcaattgaaaaaaatcattcatcaagcaaaattctagcagcgtcctttaagaatgttggtcaagtcaatcgggcattcaaagaaggagcacaagcgattactgctggagcagatgtgtttgaagcagcctttggaatgccatcaattgggaaagcagtggatgattttgcaaacgattgggcaaccattcatcatcagaatatgatttaatgaaaggagaggaagatgcgaatttttgcaagtccctcacgctatattcaaggtgaaaatgccttgtttgaaaatgcgaaaacgattcttgaattgggcgatcatccaattcttctctgtgaccaactagtttatgaacttgtaggggaaaaatttgaaaaatatctcttgcggtttggatttgaagtattacctgtcttctttaatggagaagcttcagacaatgaaatcaatcgtgttgtttctttagggaaagagcaaggttgtaacttgattattggtttaggtggaggaaagactatcgatagtgctaaagctattgccgatcttttaaaatcaccagttgtgattgcccctaccatcgcttctacagatgccccagtttcagccttgtctgttatttatacagatgagggtgcctttgagcgctatatcttctactctaaaaacccagaattggtattagtggatagtaaggttatttctcaagcgccaaaacgcttgctcgcttctggtatcgcggatggattagcgacttgggtagaagcgcgtgcagtccttcaagccaacggaaaaactatgttagggaaacaccaaactctagcgggtgtcgctattgcacaacgttgtgaagaaaccttatttgcagacggtctccaagctatggcagcctgtgaagccaaagttgtaacgcctgctcttgaaaacattattgaagctaatacccttctcagtggtattggatttgaaagtgggggattagcagcggctcacgccatccataatggctttactgcccttactggggacatccaccatttgactcatggtgaaaaagtagcctatggaaccttggttcaattgttcttggaaaaccgtcctaaagaagaattgaacaaatacattcgtttctatcaacaaattggtatgccaaccactctgaaagaaatgcatcttgaaaatgcaagctacgaagatcttcttaaggttggtcaacaagccaccatcgaaggagaaaccatccatcaaatgccatttgaagtgaaggcttctgatattgcccaagccatcgtagcagtagatgcctacgttcaaggtttggcctaaatcaacatctatcattcacagagaatgtagacaaaccaagaggctgggacaaaagtcctagcctctcaattgtttttggattgtcgagcaagacgcagtggttgagtgggctctactacgctgatttcatcagcttttacagccctactcaactgtgcggaggtgggacgacgaaatcgaattctaacgaattaccgatttctgtcccactctctttttctattttcttctttttggatcggtttgtttaaagatcaggtataaaattccggcaggcaggaagcagaagagccacatgacatcgagtcccttgcttttactgctaaaggtcgttgctttagactcacttacagccactcccggtttaatgcttggagatacctgttgcaagccgttctgaacgactaggcggttgtcttccagtttaagagctggcttcgtccccttcttaacggttgcatagaagtcttgcttcaagtgaatggtcttcccgtcgatggtatgatcgcctgcagaaaggatttttttatactggtagtctgcgaacattttctcagccaaggtattcccgatttgattgcggtagctttcggcgatctcgacatcgtagttcccaacccctaaaatgacctcgataatccgttgtttccctcgcttggttgtcgcggtgtagttgtagtcagcagtcgggctggatccggtcttgagtccatctgttcctttgagggcgaactttccaccttcgagggaagtgttgtaattatcgtagctttgctcgtaaggggttccttccatgatagtggtgtgagcttgcttggtgtattccaacatttctggcaggtcgtttacgatgtgataagccagaatagacatgtctcgcgctgtaatttcgttgttcgcattgacatcgtagcgctgaggattgtagtagccctgaagcaccgagatcatcgccccatttggattgtgccatttggtatggctcatccccatttcttgcgcgtactgattcattaagtccaaaaacttatcgggatcattgtccgtaacaacgtttgcgagcataatcacagctgcgctagaagatggaacaaagagcatcttgatcaattcagataccttatagtccacaccagctacaataggtgagttgcttaacagattgttttctgaaatagcttggtctgcctctgttgctgtgaccacggtatcgtacttgatcttgccttctttgagggcccgaaagaccacataggcactcatgagcttggccatgcttccggagtcccggaccgtgtcgatattgtctccgtacaaaatggctccagtattggcgtcgatgacgatgtcggccttgggcttgtagaaatcgtccaataccagtccagcatcagctgcgattttcatgacatcttcttgctggtagatgtcgtccgcaaaagcagtggaaatagggccaaatgccaagactcctacaaggagggacaagaggttgcgtttaagtcgtttgtgtaaatgtctcccgttattcataagttccattatatcatacaggccagggattcaacttgaaaaaattctagaaaaagtagaaattgaaaaaataaagaagaaatagaataatttcgcagtaaaagcgtttacatttccctagaaagtgctataatttaaattgagtataacattttttacaatgaggtgatttatatgaacaaagggaaggtactcttagctaccagcgctctgcttttatcagctggtgtactggcagcctgctcaggagggaaatctggaagttccggagatcagacttttagctatgtctatacccaggatccggatactctcgactattcgatttctaataaaaaatcgacttccgagtttacaggaaatgcgatagatggcttgttggaagtggacaagtacgggaacttgatcccatcgcttgctaaagactggactgtttccaaggatggcttgacctatacttataaactccgcaaaggagtcaaatggatgacttctgaaggggaagaatatggagaagtcaaagctcaagactttgtcacaggtctcaagcacgcggcagacaagaaatcacaagcgatttacttggtccaaaaatctgtcaaaggtttggatgattatgtttcagggaagacatctgatttctcaactgttggtgtaaaagctattgatgattacaccgttcaatatactttgagtcaaccagaaagtttctggaattctaagactacgatggggatcttgatgccggtcaacgaagaattcctgaaatctaaaggagatgactatggtcaaggaacttctccatctagtatcctgtactgtggtccttatttgatcaaatccatcacttctaaatcttctgcgacattggaaaagaacccaacatactgggatgcggacaatgtcaagatcggtaaagtgaagctgacctattatgatggacaagattcagagtctctgatccgtggatttgataaaggcgactatacagttgcccgtgtcttcccaagtggttctaactataagagtgtagagaagaagcataaggacgacattgtctttagtgaccaaggttcctctacctacaacctttccttcaacattgaccgtcagtcttatgaaattacagccaagaccacagatgctcaaaagacttcaactaagaaagcaattttaaataaagacttccgtcaatccattatgtttgccttcaaccgtaaggcatatgtagctcaggcgaacggggaagctgctgccaataaggtcatccgtaatacctttacgccaccaaactttgtccaaatcaatggccaacaatttggtgacgcagtagaaaaagacttggaagcttatggggatgaatggaaaggggtatctgtcgcagatggaaaagataccctctataatccaaccaaggccaaagaagagtttgccaaagctaaggcagacttgcaggctcaaggagttgaattcccaattcatttggaccttccaacttcttctacttatacggaaggaatcaaacaagcccaatccttcaaacagtcgattgagtcaactttaggagcagaaaatattgttattgatctgaaaatgatctcagatgatgatcttcaacgggtgacttactttgctgaaaatgcatcgcaacaagactgggatttgaacaataacttgggttggggaccagactatacggacccatcttcttacatcgatatcactagtggtaaatctggtgaaaatgccaatgcctactttggattcgatgctggtaccaacaatgcggccgcaaaagcagctggctttgatgaatacgatcaattaattgaggatgctcaaaaagaaaccacagatgtgaacaagcgttatgaaaaatatgctgcggctcaagcttggttgaccgatagtgccctcttgattccgatccattcagatggagcttctccaggtgtccgtaagactgtaccatactccgcagcctttgcttggacaggccacaagggtcaatccttcaactataaatatttagaagttcaagacaaggtcgtatcggctaaagactacgacaaagcgcgtgatcaatggaagaaagaaaaagaaaaatccaataaaaaagcccaagaagaacttgaaaagcatgtgaaatagacttttcttgaagaaaacaggaagggaggctgggacaaaagtcctagcctctcaattatttttggattgtcgagcaagacgcagtggttgagtgggctctactacactgatttcatcagcttttacagccctactcaactgtgcggaggtgggacgacgaaatcgaattctaacgaattaccgatttctgtcccactctctttttctttgtctgaacctttaaaaatcgcctaaaaatggtataataggagcatcacgaaaattggagagacgctatgagtttttacaatcataaagaaatcgagcctaagtggcaaaaatactgggctgaccatcacacttttaagacaggaacagatgcttcaaaacctaagttttatgcgcttgacatgttcccttacccatctggagcgggtcttcacgtagggcacccagaaggctacacagcgactgatattctcagccgtttcaaacgtgcgcaaggctacaatgtccttcacccaatgggatgggatgcctttggtttgcctgcagagcaatacgctatggatacagggaatgatccagcggaattcacagcagaaaatatcgtcaacttcaaacgccaaatcaatgcgcttggcttctcttacgactgggaccgtgaagtcaatacgacagatccaaactactacaagtggacgcaatggattttcactaagctttacgaaaaaggcttggcctatgaagcggaagtgccagtcaactgggttgaggaactaggaacagctatcgccaacgaagaagttcttccagatggaacatctgagcgtgggggctatccagttgtccgcaaaccaatgcgccaatggatgctcaaaatcactgcctatgcggagcgcttgctggctgacttggatgaccttgactggccagagtctatcaaggacatgcaacgcaactggattgggaaatcaactggtgccaatgtcaccttcaaagtaaaagggacagacaaggaattcaccgtctttacgacacgtccagatactctttttggtgcgaccttcactgttttggcgcctgaacatgaactagtagatgccatcacaacacctgaacaagctgaggctgtagcggactacaaacaccaagccagccttaaatcagacttggctcgtacagaccttgccaaggaaaaaacaggggtttggactggtgcttatgcgatcaaccctgtcaatggcaaagaaattccaatctggattgccgactatgttcttgctagctacggaacaggtgctgttatggctgtacctgctcacgatgagcgtgactgggaatttgctaaacagttcggccttccaatcgtagaagtcttggaaggtgggaacgttgaagaggctgcctacacagaagatggccttcacgtcaactctgacttcttgaacggtctcaacaaagaagaagcgattgctaaaatcgtggcttggctagaagaaaaaggctttggtcaagaaaaggttacctaccgtctccgcgactggctctttagccgtcaacgttactggggtgagccaatcccaatcattcattgggaagatggaacttcgacagctgtgccagaaagtgaattgccacttgtcttgccagtaaccaaggacatccgcccttcaggtactggggaaagcccattggccaacttgacagactggctggaagtgacccgtgaggatggtgtcaaaggtcgtcgtgagaccaatacgatgccacaatgggcaggttcaagctggtactacctccgctatatcgatccacacaacacagagaaattggctgatgaggacctcctcaaacaatggttgccagttgatatctacgtaggtggtgcagaacacgctgtgcttcacttgctttacgctcgtttctggcacaaattcctctatgaccttggtgttgtaccgactaaagagccattccaaaaactctttaaccaaggaatgatcttgggaacaagctaccgtgaccaccgtggtgctctcgtggcaactgacaaggttgaaaaacgtgacggttccttcttccatgtggaaacaggagaagagttggagcaagcaccagctaagatgtctaaatccctcaagaatgtggtcaacccagacgatgtggtggaacaatacggtgcggatacccttcgtgtctatgaaatgttcatgggaccacttgatgcttccatcgcttggtctgaagaaggtctggaaggaagccgtaaattccttgaccgtgtgtaccgtttgatcacaagtaaagaaatcgttgcggaaaacaatggcgctctagacaaagtttacaacgaaactgttaaggccgttacagagcaaatcgagtcgatgaaattcaacacagccattgcccagctcatggtctttgtcaacgctgctaacaaggaagataaactctatgtggattacgccaaaggcttcatccaattgattgccccatttgcccctcacttggcagaagaactctggcaaacagtggcagcaacaggtgagtcaatctcttacgtagcttggccaacatgggacgaaagcaaattgattgaagacgaaattgaaatcgtcgttcaaatcaaaggtaaagtccgtgctaaactcatggtcgcaaaagacctatcacgcgaagaattgcaagaagtcgctctggctgacgaaaaagtcaaagcagagattgatggtaaagaaatcgtgaaagtgattagtgtaccgaacaagcttgtaaatatcgtaacgaaataaatttaaaagtccttcagagctaagttctggaggactttttgtattcatttagagaattaacaaaaaaaatttacataatttcatagagataaatcactatttaaagaattttttagttttatccctcaaaatgcttttgttttttgcgtgaatacattataattatatcaaagaaaaagtttaaaggagatttcttatgtctaagaaaatcaaggatgaaaacgggaacgtttatgtgaaaaaaacacctttctacgaaaaatggtggtttatattgcttgtggtgttaattgcttatggtactgtaacgaagggtggaggttcaataacttcaaataattcaacaagtaactcaacggcaacacaaacgaccagttccactgagcaagcaactaatgataaaaatgggaaaactgcagtatctgaagagagtaagtctgacgagaagaaatctgtagcacaagctattcctaaaattggtgaagttactaaagtgggggatgttgaatatattgtaaattctaagtctatttctcaaaatgttggaggagagtacggaaagacagcaaatggtagctacttgattttaaatgtaacagtaaaaaattcaggaaaaaaatcaattactgttacgaacgatttctttaaactgctaaaaggtgatacggagtatgaaaccgatagtttagctggtatgtatgctaatgaggaaggaaaattctttctttcagagttaaatcctgaaaacagcatcactggtaatgtggttttcgaccttaatgcagaaactgctaatgcatcaggacttgtattacaagtacaaactggtgtttggggaacacaaaaaggaaaaataaacttggattgataagtcgtttatgtatagacattacccttatctctttcatcaaaaagcttcggtaggaagaaccctaccgaggctttttaataaatttcattctgcattacagtgaacagatgtaaaactcagtgttgttctacaaggagtttaaatgttgctcttcttccaagaaaaattgtgaaaaagagaaaaagtcaggcaattttgaggtcttcaagaattctttgaagaccatcttagaaaaaaatgttatttcgatatcgaaatagttgacagatgtaatttagggtgttacaatagtttaaaaagttcgatatagaacaaaaaggagacaaaatggacaagatgcaagggggctaccaagctttacagatacgcttattgaacgggcgactttttcaaaaactcttgagcaaggaaccagatgcccaataccgaagtgaacaagggaaaattttaacgattttgtggaagcaagagttggggtgcgctactgcgacagatatcgctcttgcgacgggtctagccaataatacattgaccagtatggttaagaaattggaagaacaaggcttggttacgattcaaccttgcacgcaggataaaaggaaaaaatatatttctttgacagacctcggttgggcgcaaaaggaaattggagaccgcgttagtaaagagttgggtgagattttctaccaaggattttcggatcaagaaattcaagaatttgaagcctatcaagagcggattatcacaaatctaaaagctaaagaaaatgacatctagggaaaggaggcaacagttatgattggaattacaggtgtaacagggaaattaggctcttatgtggcggagcttgtcgatcagcatggagttgcttctatccatctggcaagaagcccagagcgtgcaaaagtctacgcgtcagcggaaatccgtagaatgtcgtataccaatactccaaaagtgattgaggccttaaaggggatcgataccttgttgatggtctctgctcgggaaaatccagagcgtgtcaaggagcacaaggagtttttagatgccgcaaagctagcgggggtgcagcatattgtttatacctccttttatggggcagatgagaaggcaactttcaccttgtctcgagatcatgcccagacggaagcctatatcaaggagttagggttcacctacacttttttgagagataatttttacttggatttcttgattgatatggcacttgaaaatggagagattcgtggtccggctggcaggggccgtgtgtcagctgttgcccgtaaggacacttctagggttgcagcagaaattcttttaaatcctaaggagtgggaaaatcaaagcttgaatctgacagggccagaggatctttccatggaagaaatcgtagcgcttctctcaaaagagaccggtaagaccatcgcgtatgtggatgaatcagtagaagaagcttatgagtctcggaaaaaatggccagcacaaaactgggagtacgatgcttgggtcagtacctatacagcgattaaagctggggagcaagctggggtttctacagatgtcgaaaaagtcctagggcatccggcaagtagcttattggatattcttagagacagaaaacttattgaggaagaacatgattgaatacaaacatgtagccttgcgctacacggaaaaggacattttgaaagatgtcaatctccgcattgaaaatggagaattcatggtgctagtgggtccttcaggatctggtaagaccaccatgatcaagatgattaaccgtcttttggagccgacagatggcaatatctatatggatgggaaacgtatcaaggactatgatgaacgggagttacgtctcagtaccggctatgtccttcaagccattgccttatttcctaacttgaccgttgctgaaaatatagcattgattcctgagatgaagggctggactaaagaaaaaatcacttctaagacagaagaacttttggataaggtggggctccctgctgcagagtatgcgaatcgcatgcctagtgaattatctggtggggagcaacagcggattggtattgtgcgcgctatcattggagaaccaaaaattctattgatggacgaacctttttcagccttggatgccatctctcgcaagcagttgcaggctcttacaaaagatttacataaagaattcggcatgacgaccatcttcgtaacccatgatacggatgaggccttaaaattaggggatcgcattgcggtgctacaggaaggagagattgtgcaggtggcagattctgagaccattctagcccagccaaccaacgactttgtcgcagatttgtttggaggtgctcaccatgtctaaactacttacaacttttcaagaacgttttggggactggcttacagtccttggacaacacttacaattgtctctcttgaccttattggtcgctatttttctgacgattccgctggcagtttatctaaatagccataaaaaagcagcgaactgggtgttacaagttgcgggtatcttccagaccattccctcaatggctttgttgggtctctttattcctttcatggggattggaaccttaccggcccttacagctctagtcatttatgctattttcccgattttggaaaatacaatcacagccttgaacggcattgatcctagtcttgaggaggcagggattgcttttggaatgaccaagtgggagcgactcaagaagtttgaaattccactggccatgcctgtcattgtatcgggggttcgtacagcaaccgttatgatcattgggacagcgactttagccgctcttgttggagctggaggattgggttcctttatccttttggggattgatcgtcgaaatgctagtctcattttaatcggcgcaatctcatcagccattttggccattctatttaatgttattctcaaatggttggaaaaggcaaagttgcgtacgattgttgcggcctttgcggtgatgctccttggtttgggagcgagttacgctccaagcatgattcctcagaaagaaaaagaaaatctagtcgtagctgggaaattggggcctgagcctgaaattctcatgaatatgtacaaacttctcattgaggaaaatagtgacatgacagtgacggttaagcctaactttgggaagacagatttcctttatcaagcgcttaaaaagggtgatatcgatatctatccagaatttacagggaccattacaagttctcttttgcaaccagctcctaaagtcagcaacgactccaaagaagttttcgaggttgcgcgtgatggtataaggaagcaagatcatctagccttgctcaaacccatggcttatcaaaacacctatgcgattgctgttccgaaaaagattgcaaaagagtataatctgaagacgatttctgatctcaagaaagttcaggacaagcttaaagctggtttcacgttggaatttaacgaccgtgaggacggaaacaaagggcttcaatcagtttatggactaaatcttaatgtagctaccatggagccggcccttcgctatgaggcaatccaacaaggcaatatccaaataacagatgcctattcaacagacccagaaattgctcaatatgatctagttgttctagaggatgaccaacacctcttcccaccttaccaaggagcacccctcatgaaagaagctcttcttaagaaacatccagaattggaaggtattcttaataagttatctggtaaaatcacagagagccaaatgagtcaaatgaactaccaagtgggagtagatgggaaaccggctgctcaagtagcgcgtgactttttggtcaaacagggattattgaagaaatgatgcagcaagaggaaatacaagagactcttttgcgactctgtgagcactatagagaacaaaattggtggcaatcggagaacaaactggaagatctggtatcgactattttgatccaacggacaacagagaagaatgctaagttggctttagctggtttgatggatgtcatgacagtagaggggatcctggctttaccgctagaagagttacaggaacgtattcggcctgccggattttttaagcaaaaatctcaaacgattaggggacttctgatatggttaagagaagttggtggttttgaggttctgtccaagattggaacagaagatttacggaagcaactgttggagttaaaagggattggaccagagactgcagatgtacttttactttatctttttgatcgtccagtttttatttcggatgaatatgcgagaagactttttcgacgcttaggatttggaaactttgatacctataatgacatgcatgctgtttatggtaacgtcttggaagggctcgctctcaaacaatgccaggagatccatgctgtcattgatgaacatgggaaagcttttcgcaaaagtaaaggccagttagacgaaagttggttacgataaaaaagagcccgggacagtcgttccctgactccacaaaagcaacggatttgccgttgctttttgcatggtttcgatagccttagtaaaatagaattggtcaataagtcatttagaaaatcgatctcatgcatatgaaaaagtgatgaatacagtagaggatagtcacttctacactctctatcatcactttggctgccctttttaacccctaaaatgctttcagcaagcttttgggttagaagaggagaccttccttcaaaaactctccattgagtctggcttgaaattgtgttacaataagccttgaaaatgaatgaaagtatatggaaaaagcatgaaaaaacgaccagtaattggaattacaggaaatgaaagacccttcccggatgatccagacgcgaatatgagctatgcggcgactggttttgtcgaagcggtcaaagaggcaggagggattcctttgatcttgcctattggagatgcggccttggccaaagactacatatcgatgattgataagctcatcatcaccggtggacaaaatgtcttgcccaagttttacggagaagaaatcaccatcgacagtgatgactacctcttgaaacgcgatctctttgagttggccttgattgaagaagcgcgtgcgactaaaaaagcgatctttaccgtctgccgtgggacccagctctataatgtcgctttagggggaacgctgtatcaagacattgaacaccattggcaagacaatccaggtcagtacaccagccaagagttggtgaccaaggatcagacgatcctgcaagagatctatggtaagaccagtcgcatcaattctttccatcatcaaagtattaaagacttggcagatggcttagaagtgatcgcgcgagatcctaaagatggcatcatagaagccgttcaatccacagatgagagtcgtttcctcggcgttcagtggcacccggaattgcgttttgacaagagcccagcagatcgcaagctctttgaatatgtcgtgaatgacttataatgaggaccagcttccttaggaatttttcctaaggggctttttctttaatctgcgtaagaaagactgtaaattgtgcctaggttttggaagaggatgcgctacaatagagctagtagaatgaggaggattaggacatgtatcaatttccaaaggattttttatgggggagttcgacctcgggccctcaaacggagggacgtttcgcccaggatggaaagggagacaatctatgggattactggtataggatcgagcccaaccgcttttatcaagggcaaggaccagagaaaacatcgactttttatgaacactgggaagacgatctggacctcttgttagaaactgggcacaccgcctttcgaacctctatccagtggtcacgtattttcccagaaggacgaggggagatcaatcaagcaggtgttgatttctaccgtcgtgtctttgaaaagataaaggaaaaagggattcacctcttggtcaacctctatcattttgatttaccgatggctcttcaagagcaaggggatggttgggaaaataaagaaaccgcctatgcttatcaggaatatgcgcgtttttgtttcaagacctatggagatctggtcgatcagtggatcacctttaatgagcccattgtccctgtggagtttggttatttttatgatgcccattttcctcataaggtagacgcagcagcagctgttaaagtagcctaccacacccagttagcaagctctctagcagtgaaggcctgtcatgaggtggatcctaactatcgtattgggattgtgctcaatttgacaccagcctatcctcggagccagcatccagaagatgtgaaagccgcgcgcattgccgagctctttcaagccaaatccttcttagatccatctgttcttggtcgttatcctgaagaattagtggagatcctacgggagcgtgatctcttaccggattatgatccctttgaattacgcttgatcgaggaaaatacggtggattacctaggggttaactattaccaaccactccgtgtggcggctcctcgttatgctccaaatccagcatctcccctactctttgaacaattttatgaaccctatgtcatgccaggccgcaagatcaatccccaccgaggttgggaaatctatgagcaaggcttgtatgacattgcccaaaatatcaagggaaactatggcaatatcgagtggatcctgaccgaaaacgggatgggggttgaagaagaggaaaaattccgcaaggatggagtgatccaagacgactaccggattgactttgtcaaagaccatcttcgtgagctccaccgggctattcgagatggtgccaactgtaaaggctatttgatatggacctttattgactgctggtcatggctcaatggctacaagaaccgctatggcttggttgagttggatcttgaaagccaaaaacgaaccctcaaaaaatccggtcattggtttaaagaactaagccaagccaatggatttaaagattaaatcgagatccgtagcccatcttcaattcgtattgagcccctcgtattgtcgttttaaagcttggagtctaataattccccaaacggtttgacactcaattattccgaatgtctgaaaccattatgtttcaggcatttttcttacagtggaaattttctcaaatgactttgtcttcaatcttaactctgacttaactagaccaattttcttgaatttcctagttgacaaactggaagaagcattgtataatgactccgctggttgctttttaggtaaattagactagaccaattttaaagtaactgagaaatcgaccatgggtcgtttgactaagtaaaggggaaagtatagcaaggctatatcgtaaagactatgtgcggaatcgttggtgttgtaggaaatacaaatgctactgatattttgattcaaggacttgaaaaactcgaataccgaggctatgactctgcgggtgtttttctggctagtgaaggcaagagccaattggtaaaggcagttggccgcattgcagaattgtcaactaaggcagaaggtgtcgaaggaacagctgggatcggacatacccgctgggccactcacggaaaaccaactgaggacaatgctcacccacaccgctctgaaacaggtcgctttgtattagtccacaatggggtcattgaaaactaccttgaaatcaaggaagaatacctagcaggtcaccatttcaaggggcaaacggatacagaaatcgctgcccacttgatcggaaaatttgctgaagaagatggcttatctacgcttgaagccttcaaaaaagccctccacatcatccgtggggcctatgcttttgctttgatggatgcggaagatccaagcaccatctatgtggcaaaaaataaatcaccacttttgatcggtcttggagatggttacaatatggtctgctcggatgccatggccatgattcgtgaaaccaaccaatacatggaaatccatgatcaagagttggtcattgtcaaggctgacagcgttgaagttcaagactatgatggaaacgtcaaagaacgggatagctacacggctgaactcgacctttctgatattggaaaagggacttacccatactacatgcttaaagaaatcgatgagcaaccaactgtcatgcgtaagttgatccaagcctatacagatgaatctggtcaagtagtggtagacccagctattatcaaggctgttcaagaagcagaccggatctatatccttgcggctggtacctcttaccatgctggatttgcttctaaaaaaatgttggaagagttgacggataccccagtagaactcggtatttcatctgagtgggggtatggtatgccgcttctcagcaagaaaccactcttcatctttatcagccaatctggtgaaacagccgatagccgccaagtgttggtcaaagccaatgaaatgggaattccaagcttgacagtgaccaatgttccaggttcaactctttcacgtgaagcagacatgaccatgttgctccatgctggtcctgaaattgcggtagcttctactaaggcttatacggctcaaatcgcagcccttgcctttctggctaaagctgttggggaagccaatggcaatgagaaggccaaagcctttgatttggtgcacgaattgtctatcgttgcccaatcgatcgaatcaaccctttcagaaaaagaagtgatcgacgaaaaagttcgtggcttgttggaaacaacccgcaatgctttctatatcggacgtggccaagattattatgttgccatggaagccagtctgaaattaaaagaaatttcttacatccaatgtgaaggcttcgctgcgggtgagttgaaacacggtaccatcgctctgatcgaagacggtacaccggtcattgccctcttgtctgatccagtcctagccagccacacacgtgggaacatccaagaagtggcagcacgtggggctcatgttttaaccattgcagaagaaaatgtcgctaaagagacagatgatttggtcttgacagcggttcacccttacctctctccaatctcaatggtggtaccaacccaattgattgcctactttgcagcccttcatcgtggactcgatgttgataaaccacggaaccttgctaagtctgtaaccgttgaataaaattatctatatagaaaaaaacatcctcgttaggtttttcctagcgaggatgtttgctttatttatcaaaaccttgcaaggctttgaggcgttcttctgtttgtcccttggcatctagttttttaccttggtaaacagcagtttcccatgatccatacattggatttgggaagatgatgaatttttcaccaaattctttttgcaattcgtccaatttcttgtcgcgatcagcttcagaggtcttagagaagtctgcaaagtcaaccaggttgtccccgaagagcaagacaagattggtcttttcttgcacagcttggcgacggccttcttttgatttgacaccatcttctaagaacatgaggtggtcacgtccttgaacaggaataccttctttttcaagattcttgatggtatcatctacttgagaggttgtacggtcagaaatgtagtagatttgaaccccgttttgatccgcatattgaaggaaatctttggcgcctggcaccgcttttgcggctgcttttttcacccaaacatcccaatctttaggattgaaggccgtaccatctttgacattttgaacttggtaagggctgttgtctaaaacagtttcgtccaaatccaagacgatggaataaggcttatcagaaggcgtttggaggatctctttcaaacggtcagtagcgacattgtatccttgtaaatacaaagccttggtttctgctgccttttggtaccagagaacagacatggtattttcttgtgagcgctgctgatcataggtcatcgtcacctgatttttagtgctgcttgcttttgtctcttgcgttttagtggtgttgcttccacaactcgtcagtaaaatgacagaagcaagagcagaaacgatggtaaaggtggtttttgttgttttcataaaccgtacactccttaaaattattctacaaaaattatactcctttcaatcttgcctgacaagaaagaggagaaggtgtctaggaatcggtgaaaagaaaaaagaaggaaaaatgctgctatgaaaggtttcttcgcctcaacatatgctattttttcctttaaaagaagggatatagttttctgttataaccggatcaagaaaagatcaaagcggtccttttcttctaaaatgaaagaatagagaaagatacccgcaagtccctattttcaaggacttgcgcttttttgataccttttttaataaagaaattttaaggccttgatagggaaaatatattagtcagctacttttcgaggtgatatcatggttacaaattccagaaggaaagcagttagtctttcttttggagaaaagatgaggaggattcacagtatgagtaaaaaagaattggttcttcgtgccattcgaggcgaaacagtagagcgaatccctgtaggattttggctccattatgtgacccaagaagaaaaagaattgggtctagacaatccggctgtagtagaaaaaagtattcagggacaccaacactatgtagaagaaatttcacctgattttgtcaagatcatgagcgatggcttcttccgctatccgagtgcactttattcgaaagagatcaaatcgatccgagaattgaaggatattcaaccgattggagagcatcatccttggattgaaaaacaaattgaagtggtcaaggagattcgttcccatttccatgaagagattgcttctttctacaatatcttctcgcccatttcttatttgaaacgctggttccgtacggaccaatcccgtggagaccaagtgattgcagactttatcaaggaagatccagaaactttagctcatgtccttgacgtgattgcaggagacatcgctactttaagtcgccgcttgatccaagaagcaggtattgaagggatttacttttcaacccagcagatccaagatgagcgtgtgacagaggaagaataccgcaagttcattgaacctagtaacatcgctgtcctagaagcggctaatgaagcgggtggcatcaatatccttcatatctgtggttttgaaggggccagcaatgaagtggaactcttcaaggattatccagctcaggtcattaactgggcgacccatcatgaaggccttagcttggccacaggtcgtaaacttttcggcgatcgcgccgttttgggtggctttgtcaatggcaagaaaggtttgctctaccaaggggaacgagaagcgatcgagcaagaaacgcgtcgcttggtggcagaagccggaagtcgtggtttgatccttggagcagactgtaccgtgccagatgatttccaattggaacgcttagattgggtacgtaaagcagctgtattgtaagaagaaaggagagggagatgaaaaagatcaatgtatggtgtatcctggtaaccgttttgtttttgcttctagggctgagtaaagccactctagcaagcagtcaggggaaagcaaaaaaagatccagatatggcaagactggagagaattccagcccatagtctctccctccttcgcccatctgatctagcaggaattcttcttctcgaagatcagtgataaaaaaagatgaagaacttgataaaaaatatatattagtcaaagcatcattgaagtgataagataacaaacaagaaatgaatagaacgaggtaagaacatgtcagcaaaaagagaattagtcttaaaagcttttaaaggagaagcagttgaccgtgtgccagttggattttggcatcattttacaacagaagaagaatggttgaaaggattttctaatccggaaattattgaaaaaaacctcaatggccataaaaacttccttcacaaggtcaaaccagactttgtcaaactcatgagtgatggttactttgcttatccaaacccagccattcacaaaggccttgaaaatatctctgacttagcagggattgaaccacttggagcagatcatccatggatcacagagcaagtagagctcgttaaaaaaatccgtgccggttttgaagaagacattgtggctatctacaatatctttgctccagtgacctacttcaaatggttggtcggagaagtttcaggaggagatgacttgatcgccaacttcatcgatcaagatgcagcaactcttaaaaaagtattggatacaattggccaagatattgcaagtttgagccaacgaatcattaaagaagcaggagcagacgggatctacctcagtgttcaaagtatccaagatgcgcgggtcacacaagaagtttataaaaacattattgcaccgagtgaactccatgtcttagaggcagctaatgaagccggtggcgtaaatatccttcatatctgtggttacgaaggagctcgcaatgatatccatctcttcacagactacccagcccaagtcattaactgggcagtcggaccagaaggaatcagcctagcagaaggacgcgaaatcttcggtggacgcacggttcttggtggttttgaaaatggcaaaaatggtcttctctacacaggagacaaggctgcgattcaagcagaaaccaaacgcatcatcgcagaaacaggaacgacaggattggtcattggtgccgattgtaccattccaagtgacattgatgaagaacgaatcgaatgggttcgtgaagctgcagcagaataaggaaaatagaaagagggagaacagagtatgagtaaaaaaacatggattatcggtggggtggcagttcttgccattgcaggtgcaactattcttggacggagcttgaaccatgcaaacgacagcaaaggttcaacaggatcgaacaaggtaacaaccttgaaagtagcccacactcaaaactatgtaccgtatgatttcgttgatgaaaaaggagaatcagatggctatgaagtagctgtactcaaagccattgatgaaaaactaccagactacaagtttgagtacactggaacaagtgatgacgatctcttgatcggtctagaatctggtaaatacgatatcggaaccaaaggagcttggtataccgaagaacgtgccaagaaatttatcattccaaaagaaccaatcggagcaagtatcatcggatttaccgttcggaaagaagatgcgaataaatacaagaatatcgatgacttcgctaaagaaaaaggaaaattggttccaatttcaccacaaaatgcgcagtggaatgttattaaagaatacaatgaaaagcataaagaccaacaaatcgaattaacagctgcggaatctttcaaagtcgcagatgcctatgcttgggttcttgaaggacgttacgatgccttctttgacatcaaactttcctttgaaaaagctgtcacagataaagatggttcttaccaccaatatgcggacaaactgagctggtttgcctacaaaggaattccaacttacccattgatccataaggataagaaaaacgaaaaatttgcggaagcatacagcaaggctatcaaagaattagaaaaagatggcacacttgctaaattgtcgaaaaaatatttcggtgaagatgtcttcagttatgtagataaagagaaataagatggaactgggtgcgcatagccccagcttccttatttctatacggatacagaaaggaaaagaaacatggtctcatacgacatttccaaggtctggtcatttcttccaaccttggtccaagctctaccagcgaccctagctttgatggtgttaacgacggttctcggttctgcatttggcttggttttgacctgggcacaagtatcagaagataaggtaggagcaggtctggcaaaaggttatgtctttactttgcgttgtacccctccgattgtcttgctctttttggtcttttatggactcccccaatttttgaactggtggttgggcattgacattgaccactggtccaagtttgtctttgtccttgttgccatgtttcttctctttgctgcgatgatctctgaggtcttcaaggcagcctatttggccattccaaaaggtcagatggaagcgggcttgagtatcggcttgacgccagctcaaaccatttggcggattgtccttccccaagcctttcgcgtggctcttccaaatatgacgactgccatcttgaacctcatgcgcgatgccgctttggcttataccattggctttatcgatatcatgggagcaggcaacaacttgatcagccgcaatcttgggaattattccctcgaaacgtatacagctgtagcagtgatctactggggaattgcccttgtgatctccttctccgctcaactccttgagaaacgactcagtgtaacagaaaggtagcttatggatttcaattttattagtaaaacatttctagccaccttgggtggtgtgccagtgacccttctgatcatggtcgtgtcgatcctcttaagtttctttccagccctctttttggcgctcggtcagatttataaggtcaaaggtgttcgcagtttctcagtgatttacttagcctttatccgcgcgacgcctccgattctcttgattctcttcttttatagtctctttcccagcctcttaaatagcttttttaagagtattggcagtcactttaatgtctttgagatcaatcccatttactatgcctttatcatctttagcttgatgacaacggggagtcttgctgaaattctccggtcagctattctgacggtggataagggccagcttgaagcagcgcaagccatcggtttgaccaatcgccaagcctatatccgcattgtttttccacaagccttgcgtgcagcccttcccaatttgtgtaacttggttatcaacttggtcaaaggaacttcccttgtctttgtcatgaccatcaaggatattaccgccattgccaaggtagaagcctcttatggctatcaatattttgaatcctatctagtgatttttattctttatattgtcatttgtggggtgattcagtggggattcaacctcttagaaaaacgcctgacactcgcatagaagaaggagaaataagaagatgttagaagtagaacacgtatcgaaaaaatttaaggaccaccaggtcctggtagatgttaatctcaaggtcaaccaaggggatgtggtcgttattttggggccatctggatcaggaaaaacaaccttccttcgctgcctcaatcacttggaaaaggcagacacaggccacctaaccctaggtggaaaagagtacgacctctcaaaactcagcaaaaaagagattctagaaatccgccaaaagacagcctttgtcttccagcattataatctctttgccaacaaaacagcgcttgaaaatatcttagaaggcctggttgtagcccgtaagattccaaaagaagaggctatccaacgggcagaatcagcccttgaaaaagttggtctcctcgcttacaaggattactatccttctcaattgtcagggggccagcagcaacggatcggaatcgcgcgtgccatcgcagtgaaaccagatgtgatcttgctggacgagccgacttcagcgctagacccagagttggtcggggatgtcttagatgttatgaagcaattggcccaagaaggagtaaccatggttgtcgtaacccatgagatgggctttgcgcgtgatgtggccaaccacgtcatctttatggatggcggacacatcattgaagaaaatgaaccgcatgaattcttcaacagtccaaaagaagaacgaaccaaacaattcctttcacggattttatccgatgctacctacagtgtcgaatatatgatttaacaggagacacacccagtaagggtgtgttttttaggatctggaaaaaatttttaaaaattggctcattttttaaaaaacattacgaataatataagtgagagggaacatatgactgataaaaaacaacgattaatgctactatttttactgactttgtttttaggaggttgcagtctttttacggataaagctgctgagagaagggaaatgattcagatcgcagaaagcacgaaaatggagcgagcgataaaacacttgttaatcagtatcgatcctaaagctttcacttcagaaggggtcattcactcctataccctgataaaaggtgaattggaatacaatccaatgggagggatgaatatcactctcgttatcaatggtgataaaaagttaacgatcgatacgactgttcaaatggaagattcaggacagttcgaagcaggtagttacggtatttcagcaaaattaagtgatctgttaagtgaagcagaagaggatgggaaataaactcatttaggtaaacacccctaatataagtaaatagaaacatttctggatcaaaaccaatatattacattaatagctagtgtttgtaacgatttggcaacattttttaacaaaagtaacatttcaggtatggatagaattttgtataataaattttaagaaatctgaagaaagaatgggaagaagatgaaaaaaagtaaattaattgtgttgataatggtagtatttagcctaagcttaggaggctgtagttttttcaatggacaatctgccaagaaacaagaaatgattcaaatcgcagagagtaagaagatgaaagtggcgattgaaaatatgttgaaaaaattagaccctaaagctcttactccagaaggaaaaataaaatcatataaaatttctaaagatgatttagattataatccgatgggagggcttatgatcaaaatcattatcaatgataatgaaaatttactgttaagtacaactatacaagaggattcagttactggtaagtatgaagagacatactacggtaaaacaaaggaattgaacgaccttctgaagggaaattgaaatggctgaaaatttaaattttaatgatcaacaaaatgttaaaactgcgttacttgagtatgaaaaggatataaaagttggacgggaattcgatattggtcccaagaatgaagagtacattggtcacgtttctcatatatatgacagtaccaatggaaatgaagaacaagtttttgtattgacaaataatggtatgggaattaatgaagatccagttccctattctgcttcagatgatgcgcgcgcccagatccatgacgtgacagtcttgatgaagggatctgaaactgatacaagtacacaaaaattactccatgatacatttacggattgggtaaagacagatttgccagcagcttccaatattttgaatcctggtggtgcgagcgagtatgcaaccgaatatgcgaagaattatgcgcgtgataaggctaaagatagttttaacaatgctgtagaagctttcgaagatgcaattattcctacatctgttaatcttccaccggaggccactcccgttggtaggttcatacaaaaagcgatggacaatcctgtcagcaatttcgtacaggaaaaagcatcagatatggtcggcttttttgcagaaagaacagccgaagaacaggttaaatttcctgctttaatgggagctgcttttttaaaaaaatacaatgatgaaaacgggactttcccgcctccgcaattcaaagatgctgcagctcatttgaaagaggtgatccgaaaataccctaatgccaagatcgatctatacggtcactctctggggtctatgaatattcagtatgctcttgcctgcttgacggaagaggaagcttctcatattgggactgtacatctatataatggccctaatgcctatcccatcttaacactcgagcaaaaagcgcgtatagattcgctgaagtacaaaatctacaaccacatcgaccataaagatttggttagcctgggctatcaggattctggaagcaaggaatccagtgggattgtcaagcacctcaaaactaatgatttaaaaaatactggcctgcaacatatgatgcatggttatatctatgataaggatgggaatttggttcttgaaaagggaacggaagccatcactcgcaaggaaatcattgaagagcggatgaaggtttactatcgcctaaaggataaattgcaaaaaacaggtggtggactgagctcaagtgaacggatctatctggatgctttgcaggcgcgcttggcttctgatgagctgattcgagtagtggatgaagggctggagcaagctcagaaatctaaggtacaactggatacggatttagaagctttggagaaagtattacagaccgttccgaaaggcttcattctcaatcttgcggaagtagaggaggcttatgcacaggctggtgcaacaaggcaaacagttgtcactcaagtaagagaaaggtttgacaatcgtttggctgcatatcaatccttatcgaatgaatttcatactttaaacgagcaagtgaatgcaggaattgaactcttaaaaacaaaagatcaagaaatagcaggagaaatgaaccagtgggaacaactagcttattaatttcatctactctttcgaaaaaggaaaagaaactagatcacttggaaagagagtttcaaaaagcgcgcttggagctagatgaaaagcgttgcctagtggaaagaaaacagcagctcttcacccagatgctggaagaagaatatgcgatggcagcttcctttttacaaaagcaggcggttgatgtcagttgtggatgggagtccctccatcgctgtatcgaagagtatgatctcgaagctagagaagctgcacaagtagccttaaaacagatcgaaatcgaggaagagaatttatggcaatcctaccggaaagatagacgtcaactggaagaggagtttgcacaagataaagtttcatagtatagaagaggaggaagtatgggtgatagtccagtcaaagatttctttgatttagatatgaaagataagatgaagatcatcgaaagccgaaaaaaacttgaaaaagatttaatccgggttgtctatgcgcccgttttattgacctgcaaggcaggagttgagaagcgttacaatgatggattgactgcgattacaacagtagccgaagaagacgtccaggtagttggaaaacaactggaccaatccatggtggggcaatttgctaaaaatgtacagacggctattcaagaaaaagctagcaaatttaaatctatctagccaagtacttctatttaaatgtggaatctggagtgacatccagatttttttaaaaaaaaattaaaaattatgtaaaaaagtgttgacaaagaaatcagtctgcattataataatttatgtaaacaaaaagaggttgggaaaacctactggtttacaagatcaatagtggaaaggagatggtgatatgctatttccagaattaagacaactaattgataaaaggaaaaatagaaactgttagcctgtagggctattattaaataaataaattaaaattatgtaaacaatcgaacagcagccaattggtctgctaattttcaaaaatgaattaaaattatgtaaattagaggtatacaatatgaataacaactttaacaatatggatgatcttttcaatcaactaatgggaaatatgggtggttttcgttctgaaagccgtcgctacatgatcaacggtcgtgaagtgacaccagaagaatttgctatctaccgtcaaactggtcaacttccaaatgaaggaagcgagcaagtgcaacaccatcaaggtaaaggaatgaaacaagatgggatccttgcaaaacttggtcgtaacttgaccgaagaagctcgtgaaggaaaattggatccagtcatcggacgtaataaagaaattcaagaaactgctgaaatcttgtctcgtcgtaccaagaacaaccctgtccttgtaggggatgccggtgttggtaaaacagcagttgtagaaggtttggcacaagctattgtgaacggggatgttcccgctgctatcaagaacaaagaaatcatctcgattgatatttctggtctagaagctggtacgcaataccgtggtagctttgaagaaaatattcaaaatctgatccaagaagtcaaagctatgggaaatgttattctcttctttgatgaaatccatcaaattcttggtgcaggtagcacaggtgatggtcaagggtctaaaggtcttgcggatattatcaaacctgccctttcacgtggggaattgacagtcattggggcaactactcaagatgaataccgtaacaccatcttgaagaatgcggctcttgctcgtcgtttcaacgaagtgaaagtcaatgctccttctgctgaagatactttcaagattctccaagggatccgtgatctttatgaaaaacaccacaatgtcatcttgccagatgaagttttgaaggcagcagttgattattcaatccaatacattccacaacgtagcttgcctgataaggccattgacttggtcgatgtgacagctgctcacttggcagcccaacatccagtaacagatgtccatgctgtggaacatgaaattgaagaagaaaaaaccaaacaagaagaagctgctgctaaagaagattacgaagcagctttgaaagcaaaagttcgtatcgaagaacttgaaaagaaaattgccaaccacacagaagaccataaggtaacagcaacaatcaacgatgtggctgaatctgtagaacggatgacgggtattccagtttctcaaatgggtgcaaccgatatcgaacgtttgaaagatatgggtcaccgtttgcaaactaaggttatcggtcaagataaagccgttgaagcagtggcacgtgctatccgtcggaaccgtgcaggatttgacgaaggtaaccgtccaatcggtagcttcctctttgtaggtcctactggtgtcggtaagactgagttggctaaacaattggctcttgatatgttcggaaccaaagatgcgatcatccgtttggacatgtcagaatacagcgaccgtacagccgtttctaaattgattggtacgacagctggttatgttggatatgatgacaatagcaataccttaacagaacgtgttcgccgtaacccatactcaatcgttcttcttgacgaaattgaaaaggcggatcctcaagtgatcacccttctccttcaagtcttggatgatggtcgtttgacagatggtcaagggaacacggtcaacttcaagaacactgtgattatcgctacttcaaacgctggctttggttacgaagccaacttgacagaagatgcggataaaccagaactcatggatcgtttgaaaccttacttccgtccagaattcctcaatcgtttcaacgctgtcattgaattctcacacttgagcaaggaagacctttctaagattgtcgatttgatgttggtagatgtcaataagaccctttctaagaaggaaatcgatttggcagtgagcgatgcagccaaagaatatatgactgaagaaggttatgatgaagtgatgggtgttcgtccactccgtcgggtagttgaacaacaaatccgtgacaaagtcacagacttccacttggataatttggatgccaaacatcttgaagctgacatggaagatggtgtacttgtgatcagagaaaaagataccaagaaagaagaaaatacggataaagaagcagagtaacttctgacagtgatagaaaaaatggggactgctataatatagcagtctttattttttcttcccacctgggggaaattattcgcctgatagaatcgaaaacaccaaaaatgtgcaaaaaaatattaataattagggaaaatcataggaattaagcaaatttattaataaataaagaaaataagtatataatctataaagtaaaaaaatttgaggaatggaagtatgatgaacaatacaattgatatctactcaactcccgaatacaaaaaggttgaagctgttgttcagttgatggtagatggtcgtttaacgagctaccgtgttgcaactgaaaccaatatcagcaaaatgagcttagcgactttgaccaagggaacgagtaaaattaaaaatattacctatcaaacagccttggccttgattgattggtatgatgagaatcatgaaaagtatggcattgagattgactagtcagtagcccacttttcgtggtttttttctttttcatcaaaacttgcctcctctttgagactggagtctgatttgcttgaagaggatgggaaaacttgaaaagacaggcgaaatttgatatagtatagcatatatgaaaattaaaggagaaacatatgcaaggcggaagtttgctaattatgcttgttcttatggtcggtttgatgtacttcatgagccgtagccaaaagaaacagtaccaaaaacggatggaaagtttgaataaacttcaaaaaggaaatgaagtcatcacgattggtggcttgtacggaactattgatgaagtcgatacagaacgcaagacggttgtcttggatgttgatggtgtctacctgacctttgaattaggagcgatcaaaacagttcttcctgtatcagaaggaatctcagccactgctacagaaggtgctagctcagatgccgattcagccatcgaagaataattatcaaggaagaggcaaaggcctcttttttgatgggcaaataggacgatgagatgaaggaaagtactgctggttcaaaatagaggccatagtccctattttatggggatttatggtataatgaagcgataaatattgaaataggtagaaaaacatgtttcgttttaagaagaaagaaaaaatcgagattcctttagaagtcccgaaacacattgggatcattatggatggcaatggtcgctgggcgaaaaagcggatgcaaccgcgtgtctttggtcataaagcagggatggaagctctccaagaagtgacgattgcagcgaaaaatatgggggttcaggtcttgacagtctatgccttttctacggaaaattgggcacgccctgaagatgaagtcaagtttatcatgcacttgccagttgagttttatgatcgcttcgtccccgaattgcatcgcaataatgtcaagattcaaatgatcggtgataccaagaaattacccaaagaaaccttagaggctttggaaagagcagaagcgatgacccacctcaatactggcttgattctgaatttcgcactcaattatggtggacgtgcagagatcactcaggctgtgaagcaaatcgcccaagaagtcttggatgcgaagttcagtccagaagatattacagaagaagtgatcgcagattatctctacaccgaaagtttgccacgtattctaagggatccggatttgattatccgtacaagtggggagatccgtttgagtaactttcttccttggcaggctgcttacagtgagttgtatttcacggatgtgatgtggcccgattttggagaagaggcactaagaagtgcagtagtagaatatagccatcgccaccggagatttggcggtgtttaggagaagatgatgacgaaagatttacaaaaacgtgtgatttttggagggattgccctactctttttcattccaacagtgatggttggaggggtgttcttccagattgtaattggtttgattgctatgctaggtgttcatgaactgctcaagatgaaagggcttgaaacagcgacctttgaaggtgcgctcgccatgttagcggcttttgttttgaccttaccgatcgaggactaccttccttaccttccagcagatggcaatatgattgcttacggtttaatcatcttgactctaatgggaacaactgttctcgctcagaattacaattatgaggatgtggtctatcccattgcttccagcttttatgttggacttggtttccattccttagtagatgctcgaattgctggtatcgacaaggttcttttagccctctttattgtctgggctactgattcaggcgcctaccttgtgggaagtcagtttgggaaacgcaagctcatgcctacggtttctcccaataaaacggtggaaggtagccttggtggaatcctatctgcagttgttgtgaccgttctttttatgatcattgatcgctctgtagcgggtggacatggtttttttgccatgatcttctttactatcctttttagtattgcaggtcaatttggcgacctcgtagagagtgcgattaaacgccacttcggtgtcaaggattctgggaaatttattccaggacatggcggtgttctagaccgctttgatagtttgatttttgtctttcccttgatgcatttcttgggcttgttctaagacagaagagatagaaaggaaaccacgtatagaacgatgcagtttattgcctttatagttatttttggagtgatcgttctcgttcacgagtttggtcatttctattttgcaaaaaaatcgggcatcctagtgcgagaattctcgatcgggatgggaccaaaaatctttgcccatattggtcaagatggaacagcttataccattcgcattctacctttaggtggctatgttcgtatggctggctggggtgaggatacaactgagattaaaaccggaacgcctgtcagcttgacagtaaatgaagctggtaaggtcgtccggatcaatctttctggaaagaatctggatcagacagcccttcccatgaatgttacccagtttgactttgaagacaaactggaaattacgggcttggttctcgatgagaccaagacctatagtgttgatcatgatgcgactatcgttgaagaagatgggacagaagtgcggattgcaccgagagatgttcagtatcagaatgccagcatttggggacgattaatcaccaactttgcgggtcctatgaacaactttatcctcagtattgtcgtctactcacttttagcctttatgcgcggtggtgcgattgactactacagcaacaatgttcaggtggcacccgatggggcgcttgctaaggtcggtgtcaaaagcactgttcagatccttcaagtcaacaacgataccgttagcaactgggatgaactgacagatgctgtcgagaaggcaaccaaggacagcaagacgactcctgaattgaccctgaaagtcaagacagacggtcaagaaaaagaagtcaaagtgaagccaaccaagtcaggggatcgttactatctgggtgtgacaaacggcctcaagacaggatttgtagataaactcttgtctggttttacagatacctggaatacagcgacacggattttgggagctttgaaagatattattttccactttagtctcaataaactgggtggtccggttgccatctacaatgccagctcacaagctgctcaattagggattccagcagtgttatctcttatggccatgctctctattaatattggcatcttcaatctaatcccgattccggctttggatggcgggaaaatcttgatcaatttgatcgaagtggttcggagaaaaccactaaaacaagaagtagaaacctatatgacacttgcaggtgtagctgtaatggttattttgatgattgctgtcacctggaatgatattatgaaattatttttgaaatagaaaaggatattgtccatgaaacaaagtaaaatgttgattccaacgcttcgcgaaatgccaagcgatgcccaagtcattagccatgctttgatgttgcgtgcaggttatgttcgccaagtctcagctggtgtctattcttatctgcccttagcaaatcgcgtgattgaaaaagcaaaaggcattatgcgccaagagtttgaaaaaattggagcagtagaaatgctagctccagcccttttgagtgcggatctctggcgtgaatctggtcgttacgaaacttacggggaagacctctataagttgaaaaaccgtgaaggctctgactttatcttgggtccaactcacgaagaaacctttaccgctattgtgcgcgactcagtaaaatcttacaaacaattgccgttgaatctctaccaaattcaacccaaataccgtgatgaaaagcgtccacggaacggtcttcttcggacccgtgagttcatcatgaaagatggttacagtttccatgctaactatgatagtttggatgttacttatgatgaatacaaggcggcttatgagcgtatctttacccgtagtggaatcgacttcaaggctattataggagatggtggtgccatgggtggaaaagatagccaagagttcatggctgtaacacctgctcgtacagacttagatcgttgggtggttctagacaaatccgtaccttcgtttgatgagatcccagcagaagtccaagaggaaattaaagcagaattgcttaaatggatggtttctggggaagatacgattgcttattcaagcgaatcaacctatgctgcgaacttggaaatggctaccaatgagtacaagccaagcaaccgggttgtgtctgaagaagaagtcaaacgcgtggaaacaccaggtgttaaatctattgatgaagtagcaaatttcttgaatgtttcagaaagtgcaacgatcaagaccttggtctacatttccgacggtgagcctgtagtagctctacttgttggaaatgatcagcttaatgaagtgaagttgaaaaattaccttggagctgatttctttgaacctgcaacagaagtggaagtgaaagaattattgggagcagattttggctctcttggtccagtagatctccctgaaaatgtcaagattatcgcagaccgcaaggttcaagatagtcgcaatgcagtagtcggtgccaatgaaacaggctaccacttgactggtgtcaacccaggacgtgattttactgcggaatacgtcgatatccgtgaagttcgtgaaggcgaaatctcaccggatggtaaaggcgtcttgaaatttgcacgagggatcgagatcggtcacattttcaaactcggcacacgctactcagctagcatgggagcagatgtcttggacgaaaacggccgtgcagttccaatcatcatgggttgctacggtatcggtgtgagtcgtcttctttcagcggttatggaacaacatgcacgcctctttgtcaataagacaccaaaaggggaataccgttacgcttgggggattaacttccctaaagaattggcgccatttgatgtgcatttgattccagtcaatgtcaaggatgaagcgagccttgctttgaccaatcagatcgaagaaagcttagtcaataaaggctacgaagtcttggtggatgaccgaaatgaacgggctggtgtcaaattcagcgatagcgatttgattggacttccaatccgcgtaacagttggtaaaaaagcagctgaaggcatcgttgaagtgaaaatcaaagcaacaggagataccatcgaagttcatgcggataatctccttgaaaccctttcaatcttgaacaaataagaaaaagctttctgagccttaaccatgtgttaaagaaatgctcagagagtttttttatggccaacactacaacggtaaggggtatggatgagatagagatgagtagaatattttttcatagagatttcttgtagatgtagaattgtcttggtgttagaataaaggggattttctatactgatctccttgtatgatataaacttctgaaaacaaaaatggaaatttatacaaaaaaatctaataccactcaaagtgcaagtgtaaaatcgacatttacattctatctgttgagttaatatatagaagaaatacatctctttcacacaatcaaattgttactaattaaagactattggggcaggcttttttgaatatatgttacatttttattacaaaaagttacattgctgtaacaaagttacaatgttttatcagtttgccctataatattgacattctcacaatatttcattaagatatttttaagtaaataatactgggagaggaaaaagggaaaatatacagttgtctggaatttcactaattcattctaatgtattgtttatgaaaaaaatataagggtatcagcccaaaaggagaaaaatatggctcaaattaaattaactccagaagatctacgtgcttcagcacaacgctatgcacaaggttctcaagagatcgatcaaatccttactactttgactcatgaacaacaggtcatcgatgcaaactgggatggatctgcatttgatagctttgaagcacaattcaacgaattgtctccaaagatcaaacaattcgctcaattgttggaagacatcaatggtcaattgattaaagttgctgatatcgttgaacaaactgaccaagatatcgctgcacaaatccattaagatagtcttggaggtgatcttacttctcgtaggtagatcacccttttgtcttttgatatatagaaaataggggttaggtccatccatccctaacccctattttgtatttatgattagaaaaaggaaaaggtatggaagttaaaaataaaaaatggttaaaatacattggtcagagtgctgttgttctccttttgatgggggctgtggtcggtctctatacgactgttcaaaaggatcaaaaacaaaatgaagcaaaaactgtacagacaacagaaaacaccaagctcaatattgcagttgtcaatgaagaccaagcggttaagctaaatggtaaagaatacaatcttggtgccagttatgtaaaaaatatcgagcgagataattcacaaagctggtctgtactgccacgtggagctgctgaatctggtcttgcagatggaaaataccaattgatgatcgttattccaagtgacttttcagagaaagttcttgaagtgaatgcagtcaacgcggaaaagactacagtcacttataaggtcaacgctgccggaaattcacaggttgaaaatgaagcaaataaagtagccaaggatattgtttcggacttgagaagccagttggtagatatgtatatggtcagcattttgagcaacctttatacagctcagaaaaatgtggagacgagtaacaaaattcagtcaacgaatattggttcttatcgtagcaatttgttggactcagctttggattcgaagaatattttcccgagtctctatagcttgtccacgtcatcggtggaatccaataatgccttaaagacggtactggaatcatatacgcaggcttttgatcaattgactcaatcccagaatcagtatggtcaaaattttgatgctcttgtaaaacaacgctctgaagataagattagttacgaagacttcatgaatcaactgatgtctatgaaccaatctgttctcagcgaaaatacgaaggaattatacaagaatcttcaactgaatcaagaaaatcttacgaagcaattaaaccaaccagttgagggtgatgcttcaggaacgaagacttatgcaggtttaaccaaagatgttaatgatcgtgttgcagatctagaaaaaggcataaaagcggagcgtcaaaagttagaagatcatgaaaagaacatcgacacttctgtgaaagagaaactcttgggctactatggtctaaaggaaggagaaaaggttacccttcgaaccttattaggtaagtcaagtattgaagtgattagcaaggcacgtaaggctgctgatgaggagattcaaactgcgattgaagcacttccaggtttggatttaaaaagtttcgatctgaataagtatggaaatcttgatacagcgattgattttgatggaagttttgcagcttccctgggaactccaaaaggaagcgcagataatttgaagaaattagcgcaggaagtggatgctaaatcaaccgttatcgcgaatatcctcaatgcaaaagccgggaaacagaaggttagtattctagctcctgcagggattaaaatagactcttggacctatgacggcaattcttacgctggtggggctgagcaggaagtgacgattcaggatgataaagaaatagccattcaattcagtgaagatggggctccaattccaagtccttcagagataaaaattattgtgaatggtgttgtttcaactaatgtaactgtatcagcagaagacttgaaaaaagctgtcgcaagttatgcaagtgaagcaagtaaaattgccttagcttatcagcatgcgcaaacgttgatgaatgcttactatccaaaagatagcaaaggagaacgtcattcaatctatgatccaattgaagatatcgatttgactgacgccttgactgatattgtgaagacagctgttgtaaacaatatcaaagattatcgcacaagcattgaaaaagatgaatcaggggacgaaactaagagtgtcaaagcacagctagatggtactctccaacgattgcaagatttaggtccacagttgcaacgtaatcttgaagagattgaaaatagtaacaacgagttgactaaaaacatcaatgatcaactgcaacaatatgcagatctccaaaaacgcttagagagcatctcgaatgctcaagaatcaagcaatcttgctcaaactaagacggacgtggacttgtcggctcttggttcggaatatacatcattgttgagctcaactgaaggggtaaagacctcttcgcgtagtaatgtagatgccgcaaattcaaccaatgaaatctttaaccaattgaacaaggaattacaacgagcgcaaggtaccacggagaaattgtctagtaatgcagagagtttgatgagtgaatttgataaggaattgtctgaaaatgggaacttcgtcgaagccttccgtaaagtcttcaacaatgcctatgaaaatggagtgccaaatgaagtcttgcttgacttcttgtcaaatccagttgcagagaaatcttcttctgtgaaagcgaccatcaatgtctaccgtccatttatctggatctttatgttggaagtcttgagcctctttacagcttatctctttgcgacgcaaccaattattcgcaagatgaaagaccgtttcaaattggatcgtttgcaagaatcggatctcttaactgtcggtgtccttgtaggactttcccttatccttggacttgtgatcggaatgatttcaagtatccaactctctgttggtcgtgaatatgttccttcgtgggtgttactagcagtattggcggggtttgtattggtacaactgcaataccttctcttgaaacacttccgtgtgattggaatgggactggccttcttcatgttgatcagctatgtctatctatcaagcgcgatcggaacgactgcgaccttgtcgggccttccagcatttgtgaaaaatattaacctcctctctattctagaaggacagtttgcgggttactttgatggacaaacagctggatttaccgtcttctttggattgttggttttcttcggccttttgactgttgccaacatcttccttccaaagaagtttactcaaacaaaggaaattgaatcaagcttatgaaaaaaatgatgtatcttctctttgtctttagtctcttgccagtagctgttgtttctgcagatgattttattgataatcgtctgcaggttaacaactcacgtcttgagacagaagaggaaaagacacttggtggccaattggatgccactgagtctcttttcaatgagaaggatcagaaaaaattagcagatgaaaaacgcaagcaagagaaacaattgaccgattcagacggccagttgttttctgctataaagggaaagaaaaaaacagagcctgaagcggacctgttccagcctgaaaatcaaaaattatctaaattcgagtccaatgtggaggacaattcggccagcttggcggattttattccagccttgcaaatgctggcttggagtgcccttctctttgggattgctggctatatttcctatcgaatctatagaaaagaggcctaaatggaccaacatatcaatgtcaccttccgtatgaatggtgcaagccatgacctccgaatcccaacgcggatggaggtgcgacgcttgattcgggaattggatcagatctttggatctgccatggagcctagaagcaagtatcagttgcgcgtggtaaataaaggcatcttgctggatgaaggcaaggtggtacaagagtatccgatcacgagtggtgatctgatcgagattgaggagtggtaaggtgaaagaagaacaatttacactggaagaacaagtcttccgttttgaaaaagaagaaacgagctggcggctggacctcaagcgttcagaagtggatagccaggatttacgcaatttatggattttggatctccatcatcccttgtttttagagcaaagcatgacagcggatcaagaccagattcatctgacctatcagacagatgcgctaggtttgagtgctaaagaaatccaggtattaccagtatcagaccgtctgcgtctagctattaatgtcttagatttggcgccagcattggagcttccggtgacctttatgttacatcccatcaatttgtttgtgactaaggatgcgcaagtcaagatcgcttaccgcggggtgccggggatgatggtgccacgtaagtgggatcaggttgaattcttgcgtcaggccaagtgctatgctgtcactctttttggggactggaacttcatggaactctatcaaggcacgcttgaattagaagatctgccagagttcttggtggaaatccgtgatgtcgctagcttagaagagatgaaagctctcttagagaaagcctaccaagaacgcaaggaagaggaagaaaagaccttgaccttggtttcaagtcgtcaacaccgaatctttaagttggcaacagtgtggctttcagctgtagtggccctcttactcttgcctttgatctatttggtctttttccaagcaccctttaaagaaaagttgcttcaagcggatacagcctatctcaaggtagactacaccggtgtgatcgatgaactggagggagtagctccaggcagtcttccaacgacacagaaatatgagttggcaacgtcttacttgcaaggcttgaatttctcagaggaccaaaagaaggtcatccttaacaacgtcacgctcaagtcagacagcctctatctccactactggatctatatcggtcgtcatgactttacccaagcgctggatacagccaaacggatcgacgattcagacttgatcatctatgcccttcgtaaagaaatcaaggcgacacgtgatagcgaaaaactctctggtgaacagcgcgagaagaaactctctgagttagaaggcgaatacaagaaatactgggatgcccgctctaaactcttggaagcagagacagatgaaaccaaagcttccactagcaactcaacaacagcttcgtctacagaaggctcctcaacagaaagctcgtcttctacaactgcaagctcgactgagtctagcgaccacaaggagtagtctatgaaaaaacgtatcatactctataaaaaaggttttcgctatgagctagcgctagaagagggaaaaacagcgaccgtatcgaatcaagaaacagctcagttgaccctggcttcgcaagaaaatccccttcatttccaatggagtcaaggggaaatcttctaccagtatggtgaagacaagggcctgcttgaaatagcaagattcttggggatgtggtctgctacttggcgacaggagaagtccatacctatgaactgctagacaaggaagaaatcctcgtagcagatgaaaagggtgcggatgtgcgcttgcattatccagtgcgctttctccttgtgaaaaaagagcagacatggacttgccagctcttatctggaaaactctaccataaccataaactcgtcagtgaagcgacttttccactggcctttggggatgagcttgccattggagatgtgacccttaagctctatccagaagaatttggcgtggaaggggctgtcgaagtgagtccttatctggtgccgcgtttgcattcacgctatgacttttacaaggactatccagagtaccaccggtctccgcgaatcatctaccggagttcggaagacaagatcttgatcaatcctccgggagcggagcctcaaaagccatcagatgaactcttgaagttgatcatgccacccctcatcatggttggggtgaccctcttgatcaccattttccaaccgcggggactctatatcatcgcgacggtatccatgtctgtggttagtgtgatcttttcggtccaaggcttcttcaaaaatcgtaagaaatacaaagaagacaagaaagagcgcgtggaactctaccatctctatctcaaggacaaggccaaggacttggaacagctatctcggaagcagcgagaaggcatgttttaccatttcccagcgattgaagatttgaccaagatggtcaaacgctatgactcgcggatctacgaaaaaacaccgcttcattttgattttttggcctatcgcttgggcttgggcaaggttccaaccagctatgaactcaaatatggtcaggaagagcgtagtgggaagaaagatgccttggaagaagaaggctatgcccttttccaagcccatcaaaagatcgacaatcttccgattgtagccagccttaatcggggacctgtcgggtacgtcggtcctcgccgtatcgtgctagaacagttgcaactcctggttgcccaattggctgtctttcactcttaccatgatctgaccattattccgattattccagaagaggaaaaagaaagttgggattggatgcgctggttgccccatgcgactctgcaagacatgaatgtccgtagctttgtctacaatcagcggacacgcgatcaggtcttgaacagtctcaaccagatcctcaagctccgcaaggcgcaaaaagaggaagaaaaagctaatgataccaagatcttccaccctcactatgtggtcctcatcaccgatgaaaccttgattttggatcatgtcatcatggagttcttccgtgaggatccgacagagctcggctgctccattatctatgtggcagacgtgctctcatctctttctgaaaatatccaaacggttatctccatcaaggaccgcaaccaagggcaattgctcttgcaagaaggggttcttcgcgagctcgacttccaattggaccacttccctgaaggctatgacaaggaagccatctcgcgtggccttgcgcctcttaagcatatccaacagctcaagagctcaattccagactcggtgaccttccttgaaatgtaccaggcggaaacttttaatgatctcaaggtcttgagtcgttgggagagtcatgccccttaccaaagtttggccgtgccgattggtctgcgcgggaaggacgatttggtctacctcaatctccatgaaaaagctcatggaccacacggtttgatcgcagggacaaccggttctggtaagtctgaaaccattcagtcttatatcctgagccttgccgtcaacttccatccacatgatgtggcttttctccttatcgactacaagggtgggggaatggccaacctcttcaaggatctgcctcacttgcttgggaccatcaccaacttggatggtgcccagtctatgcgggctctagcctctatcaatgcggagatccatcgtcgggagcgcctctttggccaatatggggtcaaccatatcaaccaataccaaaagaaatttaaactgggtgaagcgacagaaccgcttcctcacctcttcttgatcagtgatgagttcgccgaactcaaggtcaaccaaccagacttcatcaaggagttggtctctatcgcgcgtgtcgggcgttccctcggggtgcacttgatccttgcgacgcaaaaaccttctggggtcgtggatgaccagatctggtctaactcccgcttcaagctagccctcaaggtggcagaccgtggtgactccatggagatgctgcggacggcagatgcggctgagatcacccagaccggtcgtgcctacctccaagtcggaaataacgaagtctatgaactcttccaaaccgcttggtcaggagcagactaccagcctgagaaggaccagctaggaatcgaagaccataccatctacttgatcaatgaactgggccaatacgaagttctcaaccaagacctctccggtctggatatggcagaagaaatcaaagaagtgccaacagaactggatgtcatcgtgcaagaaatcaaccatttgcaccaacaagaaggcatcgcagctgtggcccaaccatggttgccaccgctcaaagagcggatcacgctggatgagttggacaaggtcgtgccaatcgaggcttggcaaaaacgaacagctccaagcgtcctgatcggggtcgccgatatcccgcaagcgcaaaagcaagaagcagtcgctatcgatctgtcaaaagatgggaatatcctcctttacggaagtccaggtacaggaaagaccactttcctccagactgccgctatggatctagctcgcaaacagagtccagaaaatctgaccatgtacctgctggattttggaactaatggtctagcacccttgactcaattgccacatgtggccgatagcctcttactcgatcagacagagaaaatccagaaatttatccgaatcatcaaccgcgagttggatcgccgcaagaaactcctctctgagcatggtgtcggcaccatcgccctctaccgtgaagtgaccggtaagcaagagccaaccatggtcatcctcatggatagctatgagtctatgaaggaagagccttatgagacagacctcttcaagctcttcatgcggatctcccgtgaaggtctcagcatcggtgtgcacctgatcatcacagctagccgtcagaacaacctacgggctcagctctattcaaacttcaagcaccagctgaccttgccacaaaatgatatctctgaagtccgcggtatcgtgggagcaaccccacttgcggccacgatggaagacatcaagggacgcgccctcatgaagcgtgacgaagtcgatgtcgtccagtttgccctaccagtagctggagacaatgatatccaaatcatcaacaacctccgcgaccaagtccaaagtctcaaagagatgtggacaggccacactccagcaggcatcccaatggtgccagatgagttgacagaagcagccttctacggacgtgaggatgtgaaagagtctatggaaaatctagaatttccaattggacttgactttgaaatggtcaaaacggtcaagattccatttgatcgcatgaaaaatctggtatttatggcggactctccagaatcactggaaaatcagcaaaaacatttgttaaatacagcacttcaatttggatcaaaattacatattatgcttgtggatccattggaagaatgtgttgcttataaggataaagtttctacttatattagtagcagtcaggaaatttctgaaattgctaaacaattaatctatgaggttgatcgtcgtcttgaaaaagatctgtattcagactggttgatcatgatgccaactattaaggcaattgttgatcaaggactcacagaaaaagatctacgctatctatttgacaatggaccacgagtaggtatgcactttgtaataggaagcgagtattcctatcttggaaataacatcaatgaggtaccgaaatatctcaaagggaatgctcaatggtttatgatcggtatgagattgatggatcaaatgttccttgataagccttataataatcgagaagcgcgtcttgcttcagatgaaatctacttgcatgatcgcaagcaagctattaaacttaaaatcactaagaatggatagggaggtaactatatgacaccaatacagagtagagaagaagtcgcaagttctatcgcttcaggaatagcgagtgcatcaggaagtataacatcagctggtaccgtcacattagatggatcgagtgagtatccaggaaatagtacagcagcacagaaaattccagaagaagccaactatgcagtctcaattagtggtgtactaaatgattttgtagaattgattcatggggttgcagcagaatttgtagccatggatagtaatatcgcatctaacatcgatgccaatacatctaatttaccagaaaccagtgcagctcctggtgagagtggagagtttgtaccaaattcaggatattttgcggaataatgaaaccaatcaccttagaagagatcgataaaaagaagaaaaacattgctcaatcgctcgatcaactgaacctagagaaaaggaaagtggaacgagcagagaaggaaatgttggaactacatcgacaaagcttaaaacctcttcgtcagatcttaacgcttcctatatcttccaaagactaccaagtctatgaaaatctaatcgtgagtgtagaaggcatcggagctatggttgaagaatggtctgaaggacgaagagcggatattaagaagcaagaaaatcagctggatgagcaattaaatgaactctaccacgctagaaagaaactattaatagaacaggagtcgaaaaagtaatatggtcaaaatggtattaggatcatcggatgcacaaggacggaccatgtcttccgttgggaaagctagggtaacagcctataactcagctgtcacagctctctctaactttaatggagcaggtgacttgcaagggagtgcttatgactctgggaaacaatatggagtgagtgtgattacgccactgattaaaggggcaatcatgtattctgagtacctcagtgaagccgtacccaaactcccctcaaaatatcggtcagaagttgggggagaagatctggattcagccgtacttgaaagagaaatccaaagccttgaaagtagtattagtagccttagaggtacttttcgtgctatggaaagtagtgatcatgcggataagagtctcctgcaaaatatatcttctcgcatggatagtttaacatctcaaaaaaatgagaagatggacaaacttcgcaagctgaatctatttgcgggaagttccaatgaagttttctcaggagaaggtgctaagagcatggacactgtggtgaaaaacttggcttctggattgaatatgatacagggagattttgcgagctttggagggaccttcccaaaacattctggaaaaacgttaaactgggctaagagtatcgaaggcgaatgggataagaaagccaagattgatgaagattatcagaaggttctggagaaggcaaatcaaggtaaggaactatctgacgatgatgtgaagaagattgaggcatatcaaaatagatatggaagagagctccccgatacgataactaaggcagttgcgcagtttgtatttaaaaaaactaaagttgctgcccgtggtaattctgagaatgatataaaaaaattatacaagaatatacaagatcttgatgataatgactggtttaagagaggtgcgcaaatacttggtttaacacctgaaaaattgacaaaagctttcctacaatcagatggtataattgaattattaaattcagttgataaaggaacaaaaggtaggaaatttgtaagtggtgtaatggacgcgatggcctggtatgaatcattaggaaaaagaggaaagattgtacaaacgatttttgatacaatttctgatatagcaaatcctgttgaagccattgtaaaaaaaggattagaaggtgtgagagactcgggattattaggaaaaggtctcaaatattttccaaaagtagcaaagtttttaggaaaagcaggaacagtaatgacatttgctgatcttggaattacagctatttctagtggagtggacgaatttagcaaatctaaagatttaggaaaagctgcagggaaaggtgcactttccgcagtttcaagtgtaggtccttttgaaggcgcaactataggtgcggcctttggaggtgtcccaggagcacttcttggagctggtgctggatttttaattcaaggtctaaaagcttggaagccaaaatttttcgatgatcctgttaaaggaacgaaagagataataaatgatgttggtaaaggtataaaaggaactgttaaaaatatatctaatgttataggtggatttggtaaggcacttggatttgggtaaaaaaatgaaaaagaaatcgatttttaaagctagttttgaagaaagtttaaatttggaagatgatggttttttacagtatcagaaacaagattattataataaacttgggaaagcctttaagaaagggagaccttccttttggtttggtattaaaacttttattcttagtctgttgtttccgataggttttaatttcataatccttgctgttaccctatcattccaaaattctgatcctaaagatttaagcttaccagtttctcagtatcctttgctaacagtcgagctttatttaatttgcttgttaatttggttgttattggtattaatgggtaaattttttaaacggacgtttatcctcccttatcgttatcgctttcatattataacttttatgatatggtttatgtttgaattgaatttgatggccataacaatgagtttacctatattaacaatatgggggatcttggtattttttgggcttctagtattcttggcttatgtaatgttaagaacggagcttagaagtttaaaaaaacgaatgtatggagaaattaagacacctactttacaagataaaattgccaaaggtattgctatttatggatcagctatattgggcttggctgtgattattaattatattttcaaagctttttctattaatttttcatcttccatagttggttttggtctctttatatgttggattttgttaaatattggtttaatagccatgattgtatttatggagtttcctttctttttagaaggttattacaaatggaaatatcccgaagaataccgcgagtgggaagggaagactgtagaagagtggtatggaaaaaaatatttaaaaaaacacaaggagttattaaaaaatgaataataaaaaagaattattaccgttaggtagcattgtctatcttcaagaaggaacacagaaattaatgattgttggtcgtggagtcatttttgacgacgaggaaacaggagaacaaatgtttgctgactacatgggtgtcttatatccatttggtcttcaaacagaatcgacaattttctttcaacatgaaaatattgacaaagtggtatttgaaggctattcagatgaggaagaagatcgatttttagaaatttatgagagttggaccaaaacactcacagttcctaggaaagtgatcaagtaatgagagtggagagagaaaggctctaagtctgcacgattcaaacatttcgggtggactctttgatttgaaagacaaggaaaatttttttctgtcatgagattattttaggaactttaaagtgcccacatccataggaaatttatttcacaagtttttcctaacctaaaaagttactttgatgtttcattcactgtatcaagctagtttttcgaatattattttgagaggctatacttttgttcagtgttaaagaattatgttttgaagaatatactcttaaccacctttgggtggttttttatcttgtggtagtgtttttcccttaaaatatagcatgatttaagggaaaaacaatttttgagggaaaatattataaagaaggagaggacaaaggtttattcctatgtcccttctcaactctctccacctagtgacgaacttgctcttcaaactaaatttcggtatgatagtagaaactattttttaaatccaagtcgatcataaaaggagggaaatgatccatgaaaaggatgatggtattactggcgagtgtactggttttaacggcttgtactcagcctaaaaaagagtccaaggagtcaaccgcaaacaaaacggagcaaactacaaaggcctcctcatctgctaaagagggacaggccttggaatttgtagtagcacctcagtatgaaggtaaaacatctaagctaattgagttaggaaaaaaattggtcaaggaacatcctgaactcggaagtgaaggtaatatggcgctctactttacgggtgctatttctgaaggaagagcagcgctcatgttgctcaataagacagatgtggatatcaagaaagatttgaatttttcgatttcttggtcttatgatggaaaatctattcttgacaatcaaaaagttagttattttatcaaggacagtggagaattaccatctcattcagcaactttgatattgttaccactaaatgaggaacaattgggaattgtagatggaatgtcggatccctctaagatgatgcttaagatgtcagatgtgagcgctgtagaataattggagagatgaatgtcaaacaagatgatggtattttggctttcaacaattgtaattgttttagctatagtttttgtaagtggcacttatttttatctatattttcgtgataaaaaaatgctccgtctggcgaaaacatctacaaaagggactgtggtaggatatggtagctttctaggtgggaatcctccaattgtcgaatacaaggttaatggtgttacttataaaaaagcatttcgttatttcattgataaattgcaagaataagtgcaacatttactcgaattcatcctttagagcttcactagcagttctgtaagctaaacattttcgtggtcggtgattgatatcatataaagccttgttcaaagcctcatcagagatagcagttaaatctgttttctttgggaaatattctcttagtaagccatttgcgttttcattgcttcctctctgccaggaagaataggcgtccgcaaagaaaaagggaattcctaagttctccaccagaggatagcaggcaaactcttttcccctgtctgaagtgaaggttttaagagcctcttttgggaatagcctacaaagttgttcgatagctgaaaacatggcttgggctgttctatctggtatcttgaaagctaagtaaaaacgagtttttcgctctagaaaggtcgctaaacagcccttacttttgcctctggaagacaccacagtatcgagctcccagtggccaaaagtctcacgattcctgacctctttaggacgtttggcaatcgacgtgccactcctaaatgtcccacgtgtttctttgggctgtcgactttttccctttcggcgcaggacgcttaaatccagatcaatcaaaccagcatagagccagttatagatggttttaaaagctaccattggcttttgttcaagctgatagcgaccacaaatctgttcaggtgaccaagaggcttttaaccccttctcaatttcctttttcaactttggtgtcaaacaagacttccgacccttttgcttagccctgtggtcgtactgttcctgtgctaagacggcggagtaaccattttggcatcgtcttaactctcttgaaatggtagacttatgaaagccaagtttacttgcaatttggcaagatttcaaacctaaatccaagtaagtttctatctttattcggtcggttatggtaagatgggagtagctcatagtttttcctcgggttctgtttgtgtggttacttacagtttacactaatgaaacgctatgagtttttttgttgcactatattttacaatttatccattattaaaactgtttctacgccatggggacctaaaaatgcgccaaacctatatacaagagaagatatcttagctaattctattaccttttatcggaattcatttgtttcttttaataccgtcttacggacacattttccaatatgctcttatatgacagtctggtatgatcctgcaaaaccaagtagagcctatgtagagcgttattgcggtgtgaatcggtattataaatgggctggaatcatttttagtatcatgatgtttttagtgtatatttttttaatttttgttcttgttaagaaatgaggtataaatgtcaaaatatagtcaacaagctgcaattcgatcacaaattagtgcagcacaatcaaaaaaagaaggatatttaaagaaagctcgagaagtaaaaaaaatctatgaggaattaagaactatcaagggtgaatttgtaaaacagaaaaaatctttaaatactaagaaaaatgaacatgatgattcatggacaggtaatcttcataacacgaaatttattactccagcagaggatctcattgagaattttgatgctagtattaaagcaatgaatgaaaatatcgataagttgcttaataaaataaacgagtatgaaaataaagcgatggaacaagatggattaattggtcaattaggtatattgttaaataatattagtggatggtttgaaagtcttgttaattaacatactatatttctgaagtttatcacccgagtttgaattaaacaagatgctttatcaactgtggatgattgataaaaagttataactaagaaagaaccacctggttctttctcagattgaagaaaagtccattttggataattttcttcaatcttttttaatactctaagcaataaaaattcatcccttaccagaaagattttcccttatactatggtgtattttaagggaaaatattataaatgataagagagagaactgtgatttattcctatgtcccttctcaactctctccacctagtgacgaacttgctcttcaaactaaatttcgatatgataatagaaactattttttaaatccaactcgatcataaaaggagggaattgatccatgaaaaggatgatggtatactggcgagtgtacttgttttaacagcttgtactcagcctaaaaggaactgttaaaaatatatttaatgttataggtggatttggaaaggcactaggatttgggtaaaaaaatgaaaaagaaatcgatcttcaaagcaagttttgaagagagtttgaatctagaagatgatggattccgaaagttacaacaggaacaacatgataaaattgctaaattttttaagaaaggccatgcatcactttggtttcgaattcgaagttttattgtagctctaatttgtcctgtcggatttaactttatgttgcttgttgtatctttggactttcatgatagtgaggatttgactcttccaatagccaagcacgagtcattaacggcagatgtttttttgatttttcttatgctttggttactattcgtactgattgggaaatttattaaacgaacttatcttttgccttatcgctatcagtttcatgcttttacctttctgctttggttttcattagaaatcgatctgatagttaatgacattctattagcaaatttggcattttgggaaattattgctatctatggagtaataatggtcttcatttacatgatgcttagtgtggagttaacaggattaagaaagcttatgtatgatgaggagagacaagtgacttttcgtgataaggttgctaaaataatttctatttacggcatggggattttagggattggtattgttataaaacatatttttggaatctttactgtagatatttcaaattccatgaaagcattgggttttttactcctatgggtcttttgtaatattgtggtgtttgcagtaattgtttttataggtttaccatattttctccaagcctattatcaatggaaatatcctgaagaataccgcgagtgggaagggaaaactgtagaagagtggtatggaaaaaaatatttaaaaaaacacaaggagttattaaaataggatttgagtgaaaagtatgaagaaatcaatttttaaagcaagttttgaagaaagtttaaatttagaagatgatggttttttacagtatcaattgaaggaacaaaataaaaaagtatccaaccccccaagtaatatatttggctatttcaaaaatgctctcctatatagtatattaacactcatttttccgattggattcaacttcttattattagttttttcaacaatgctttttagcagtgatccaaaagatttatctcttcctatatccaatcacaattttttaacagctgaagtttatgtaattgggttattgatttggcttttcttcgtattaattggcaaagcttttaagccgttatttattaccccttatagaactcactttcatgtcatcacgtttttgatctggtttgctatagaatttgatctcgctgctcttggtttagcattaccttttctaacaaatttaggaatttttgctctagtttgtatttttttaatcttaatttattggatgttaagaacagaacttaaaagtttgaaaaaccgaatgtatggagaagttaagtcacctaccttacaggataaaattgctaaggggattgctatttatggatcagctatattaggattgggcgtgattgttaatggtactttaaaagccttatccattgatttttccccttccttaactgttttcggcctttttatatgttggatcgtgatcaatattggtttaatggcaatgcttatttttatggagattccatattttctttatgcattctacaaatggaaatatcctgaagaataccgcgaatgggaaggtaagtctgttgaagagtggtatggaaaaaaatatttagcaaaaagaggatggaaggagtattgatttgtcgaaattaatgtataaaacaaccttaatgatggtgtccttgatagcattaattggttgtggtcaaaaagaaaaaaattcccaaagctccgacgataccggaaactctaaacaatttttcatttacaatcctcaagcagaaatcaaaaattttgaatttatcaatgatcataatggggttgtcgtagagtgggattttaataaaaaggaaaaagaagaatcgcagtctgccacaacaaatgctagctgggtgactgtaaattcagattatttggttagaaaaagagcaaaagtgagagattcaggcgctaccaaaaagatgaagtcagatgaatacttttatcttgatatttatcatttagctaatcaaaaagcaagcaagaaagaagttaatatttggcagaaattagttgactatttggacgaggatgattttgaattgatcggttatttatcaactcttagaaaatttgagaataacgattatgcagtactaactatatatagcgagaaaaattaccgttattttctattgaatttaaaaacgctgaaaattgatggtgaaaaaacaagtaaagaactagaggagaacggaagaattgctcttgagttagattccactaaagctttttcagcaggagttaatcagcttggaaatagcttttggaaagcagatacttacaaaggaaatatcaatctaaaaaataataaccgatctgcttttaacttattttcaaagaaagatagttttgcttataaagtgataaagtctgaaaatggaatgattacaaatgggagggaattattggatcttgagtcagaatttattcctgttggaaaatctgtctatgaggatctctatataccatcaaaatggagtatcaacgggaaaaatcaaaagatagtttcctatgatgagattcaagagtattataatggtgagattgaaaagagatcactagtatcataaaagtgatcccgttcgtattcactctatacaggtagggttgggaaactatcggatttgaatccgtaccaaaccttgataaagagtcaatgttgtgattttcaattattagaatgaatgaaatcaaattatgaaaaatgataaggatacactaaataagtgaatcaccgctcgttcggtgattttttcgtcttcacttctccctcgaattaatccttaaattgtgataaaataagggttacgaatgtttttgactggtctgttttttcttagagtcgggctagtcaaaagcgagcaaaagaatcaagatcaagggagaaacaatgtccaacacctttgaaattttaatgaatcagctggatatgccgctggagatgcgatcttccagtgcctttttgcatgcggagattcaagaagtcgtggtgcacaaggtcagtcgggtttgggagttccgctttgcctttgcggaagttttgccgattgctttgtttaaggaattgcgccagcgcttgaaggacgaattttcaaagacgggaaaccaagcgacctttaccatccaagtggccaatccggacttttctgaggatttactgcaggcctactaccgggaggtctttgaggaagggccttgcgctagtcaaggctttaaggggctttaccaagatttgcaggtacgtgcagaagggcaggaattgatcatctcagggccttcttcggtcgatacggagcattttcgcaagaaccatttgcccaaccttgccaagcagttggaagcctttggctttccgcatttcacctgtcgggtggagtctgatgaggagttgacagagcaggaagtggcgcgctttgagcaggaaaatgaaaagatcttccaagcggcgaatgaagagactttgcgggccatggaatccttggctcagatggctccgccaccagctgttgaagaaaagccagcctttgatttcaaggctaagaaagcggcggctaagcccaagctagacaaggccgagatcaccccgatgatcgagatcacgacggaagaaaaccggattgtctttgaaggtatggtctttgacgtggagcacaaggtgacacggaccggtcgggtcttgatcagctttaagatgaccgactatacctcgagtttttcccttcagaaatgggtgaaaaatgaggaagaagcccagaagtttgacatgatcaagaagaacagctggctacgagtgcggggaaatatcgaaatgaacaatttcacgcgcgacttgaccatgaatgcccaagacatccaggaagtcgtgcattatgcccgcaaggacctgatgccagaggatgagcgccgggtggaattccacgcgcataccaatatgtcgactatggatgccctgccggaagtcgaagagctgatcgccaaggcagctgagtggggccacaaggcggtggccattaccgaccatggcaatgtgcagagcttcccacatggctttaaagcagccaagaaagctgggatccagctgatctatgggatggaagccaatatcgtagaggacaaggtgcccatcacctataacgaggtggatctggacctcaatgaaacgacttatgtggtctttgacgtggaaacgacgggactttcagccatttacaatgacttgatccaggtcgcagcttctaagatgtacaagggcaatgttattgaggagtttgatgagtttatcgatccaggccatcctctgtctgcctttacgacccaattgacagggatcaccaacgagcatgttcggggtgccaagcccttggtgcaggtcttaaaggaatttcaggccttctgtgagggaacggttctcgttgcccacaatgccacctttgacgtgggctttatgaatgctaactatgagcgccatggtcttcccaagatcacccagccggtcatcgataccctggaatttgcccgcaacctctatccagattttaaacggcatggtttggggccattgaccaagcgctttggagtaggcttggagcaccaccacatggccaactacgatgcggaagcaacggggcgcctgctctttatcttcatcaaagatgtcgctgaaaagcatggggtgaccaatcttaaggatctgaatatcgatttgatcgatgagaattcttacaagaaggcgcgggtcaagcatgcgactctctatgtcaagaaccagaccggccttaagaatatgtttaaactggtctcgctttctgggaccaagtatttcgaaggagtcccacggattcccaagaccgtgctggatgcccaccgcgagggcttgatcctcggatcggcctgctcagaaggggaagtttttgatgcggtcatgtcgcaaggtgtggatgcggcagtcgaagtggccaagtactacgactttatcgaggtgatgccaccggctatctacgcgcctctcattgccaaggagcaggtcaaggacatggacgagcttcagaccattatcaagagcttgatcgaagtgggagatcgcctcggcaagcccgttcttgcgacaggaaatgtccactatctagagccagaagatgagatctatcgggagatcattgtccgtagtctcggtcaaggggccatgatcaaccggaccattgggcacggagaagatgcccagccagcgccactgccaaaagcgcatttcagaactaccaatgaaatgctggatgaattcgcctttttgggagaagacttggcacgcaagattgttattgaaaacaccaatgcgctcgcagagacctttgagccggtcgaagtggtcaagggggatctctatacgccatttatcgacaaggccgaagaaacagttgcggaattgacctataagcgagcctttgagatctatgggaatccgctccctgatattgtcgatttgcggattgaaaaggaattgacctccatcttggggaatggctttgccgtgatttatctggcatcgcaaatgctggtgcaccgttctaatgagcggggctacctggttggttcgcgtggatccgttgggtccagctttgtagcgaccatgatcgggattaccgaggttaatccactctcgcctcactatgtctgcagtcagtgccagtacagtgaattcatcacagacggttcttatggatctggttttgatatgccggacaaggattgtccaaactgtggccataagctcagcaaaaacgggcaggatattcctttcgaaaccttccttggtttcgatggggacaaggtacccgatatcgatttgaacttctccggggaagaccagccgagcgcccacttggatgtccgcgatatctttggggaagaatatgccttccgggcaggaacggtaggtacggtcgcagctaagactgcttacggttttgtgaagggctatgagcgtgattttggcaagtattacagagatgccgaggtcgagcgcttagctctcggtgcagctggggtcaaacggacgactggtcagcacccggggggaattgttgttattccaaactatatggatgtctatgactttactccggttcagtatccggcagatgatgtgactgctgaatggcagaccacccactttaacttccacgatatcgatgagaacgtcctcaagctcgatgtcctgggacatgatgatccgaccatgattcgcaagctccaagacttgtcaggcattgatccgaacgatatccctatggatgatccaggggtcatggccctcttttctgggacagaagtgctaggggtgacagccgagcagatcggaacgccgacgggaatgttggggattccagagtttgggaccaactttgttcggggcatggtcgaagagacccatccgacgaccttcgcagagttacttcagctctctggtctgtctcacggtaccgacgtgtggttgggaaatgcccaagacttgattaaggcaggcattgccgatctatcgaccgttatcgggtgtcgggacgacatcatggtttacctcatgcacgcgggtctcaagcctaagatggcctttaccatcatggagcgcgtgcggaaagggatgtggctcaagatctcagaagaagagcgcaacggttacatccaagccatgaaggaaaacaatgtccctgaatggtacatcgagtcctgtgggaagatcaagtacatgttccctaaagcccatgcggcggcctatgttatgatggcccttcgtgtggcctactttaaagtgcatcatccactttattactactgtgcttacttctcgattcgggccaaggcctttgacatcaagaccatgggtgcaggccttgaggccgtgaaagcgcggatgaaagaaatctctgagaaacgcaagaacaacgaagcttccaatgtagagattgacctctacaccacccttgagattgtcaatgagatgtgggagcggggcttcaagtttggtaagctagacctctatcgcagtcaggcgacagaattcttgatcgatggggataccctgattccaccatttgtcgctatggatggtctgggagagaacgttgccaagcaaatcgtgcgagcgcgtgaagaaggagaattcctctctaagaccgagctccggaagcgcggcggtgtttcgtccaccctggttgaaaagatggatgagatgggcattctcggcaatatgccagaggataaccagttgagcctctttgatgatttgttttgatggaggaaatccatttacaaaagttgatccagtttcatctaattaagacttaacagtaaaaccagtagagatgatttttatgattttcatttctgctggtttttagatatgatagaatataaataagtttttatccagagactaaaactttaggaagttatatattgaaattatcaaaaatgatcgctataaattattaataatgatactctcaaacaagagtaggcttaacggaagtagtgtttgctataccttaataacttttcgatatggaatggagataagtatgattttaggtgaaacttataggaaaataagagaagaaaagggaatttctatttcttcattagcaggtgctgaaatttcaaaatctcaaatatctagatttgaattaggagaaacagagatttctgtctttaagttattgtatcttcttgaaagaataggagtaacactagaggaatttctgcttatctgtaatcattatcaaccttcggattttaataccttaatagcttctgttaaacaggccgcatataatgaagattctcaagcattactagatatggtagagaaagaaatagaactttttcataggacaaattctcattaccataaattaaatgctattttcattgaaagtattgtttcgggaatggataagaatcatcaattgagtcgtcaagacgcctcttatcttacaaactatttattttctgttgaaaactggggttattacgaaacgctcatccttggaaattgctgtcgtgttctatctccagatttattatttagatatgccaaagaggcgctcaaaaaagggaagttgtatagctctatacctaaaaatagacaatctctcattcaactacttctcaattctttgattataatgattgagaacgacttatatgaggaatctttatttttaaaacaggctacgaagaatatattagcggattccacagatttttttgaacaaactattttgctgtatttagatggatatttggaactgaaattctatcataatcaaaaatcacttttaaaaatcgaagaagctttaaaaattttcgaactcttcaataaaacaatctacaaaaattacaaagaatactttgagaaacacatcattcatttagtagactaggccatttatctatagggtaataacgtgatcaaactcttccaatatttctggattttgatcatgagtaatgacaataacaattgcatctttaatggatagaatgtagtccatcattgctttggcttttattggatcaaggttgcttgtaggttcgtcaaaaatatatacagaatatggtttggctaaaaacctagctaaatcaattcgttgcttttctccttctgaaatggtttgatttgattgagatagactcttattaaggaagtcttcactaaatcctaaggcttttcttaatttttcagttaaataaaggtttctggacagtttgatattctctaggatatttccttcaatcagaaaatcatttttttgcacaaatgcaatatctttatataactcctctgagggaatatcaatattctgttttccgttgatttttatttccccatcataaagatttttggaataatagtttagtattaattttactaaagttgttttcccagctcctgaagcacctataatcgcatagcgtttgccttttttaaattcataggaaaaatgatcaaataatattttattttcaatttcataatgtaattggctaatagaaatggtcgaaatgttatcacaatcaattgtccttgttttatggaaaatttcatgatttgactcatataaattttcttggatattatcaataatggacttgctactgctgattaaatttttattgtaaagaatagattgtaatggagcaaaaacaccgtttaataattgaatacttgctactagtaatccaatagtcagtaagttatttcttacaaaaaagataccagcaaccatacaggatagttgagagccaaaacttagtaaaattccagtagttgaagctaagtcttttaagaattgatatgtttttctggactcttcaaattctaaactgatttcctgaattttttcttgggtccagctttgaatatttaataacttaatttgttcaaaaccattaataaagtttgtcatttttgacaaatagtgattattttgtagagaataattatttgttgatttagtcattaactttccaggaatttgtgatagaaaaatcgttatactcgacaataaaagaaagactaatgctaatcgccattctatataaataatagcaaccacactcatgataaggctccctaaatttgcaattagagagattttagggattaataaattttcttgaataaggtcactgtttttggtgatattatttaagaaatctgaatggttacggttgtcaatttggttaaattcacgcgataaataatgtaataagagacgcctttttagatctaaaataactttttttacatattggtttttaagataggaataggaacaagaaatcaagaaccacagtaaaatcgaacttacacaaatagtgatatgaaagagtaatccactatttgaattagatatactatcaagtattcttcctaattggagagagaagaatgtcattaaaagagcacttgtcagacttaataaaataagcaagaaatatagtaatttatattgtttcgtaatctgcttcatatttttcacctcttaatatatgatagcaacattatattctaaaactaaaactcaggctgagatctcccatatttgggatactaattttatttctttactatattttagtttacagctatccattgtatatcctatggatttacaatagccttcttttttgatacaataaaagatagaaagaaggtgagaatatgtcaaagacgagcatgagtatccgtttggatagtgaggttaaggagcaagcccaactggtatttaatcatttagggatggatatgaccacggctatcaacattttccttcgtcaggctattcaatatcagggcttaccttttgatgttcgattagacgatcgtggtaagttgctccaagtagtaacggatgtagagcaaaatcggaatatgagtcagccctttgaatcggtctcagacttgatggaggacttgcgtgcttaagattcgttatcataaacagtttaaaaaagattttaagttagcaatgaagcgaggtttgaaggcagaactgttagaagaagttttgaattttctggttcaagaaaaagaacttcctgtcagatatcgtgaccatcaattgaccaattccaagcatttccaaggtgttcgggagtgtcatatccagccggattggcttttggtttacaaagtagatcaggatgaattgattttaaacttgctgaggacaggaagtcacagtgatttgttctagaaacaaaggaggagaacatgaagttagaaatttttgcagaagacaaaccagctgaaaaagtctttgagtacaagctagaagtggcagacaatgtgctgctcctttccactgccatgctctcaggagtgattgctctagccagcttgttttcagccttgaaagattaactgacagcctctattttccttttgaaaatagaggtttttcagtcctttcagatctgataagtgttttctttggtactggattgtgttacaatttttagtaacaagtgtttataacaaggaaacagaaaagatgaaacaaaggagaagcgcgtggcaagatatttagtagggccttacaacaatagttggaactttatggatgcgcttgaaaaagcgcaggatggagataccatcgagtttgaaaatgggtatgtgtttcaatggccgacagatgaggtaattgtgatcaacaagagccttcattttgtggggcatgtagttccaaatccaaatggtaatgggcgcatgtttaacaacacgattgaggcttctttccgatttgtagagggagctcaggtgacatttgaagatctgtggtttaaagttggtgggaactatactgccttgaccttatggaatgagtcagctatcacttgtaaacaggtctattttgaaattaccactccgacaaatagtgaattttttatctatatggatacgcattcgaaaatgacattggatggagttgggatgaaggttccggaaaaacaccaaagtgtcatcggaatgtcagcatcagaactgtccattcaaaattcaacgattttttctaagatagatctgtcagaaggatctaaattgaccttagaaaatgtccatattgaaaaatttgggaataatacgatccatgccaaggactcagaagtgatcgcaaaaaattcaacgattacaggcggggatctggaaaaggactttccaccagtttggttgaggaatgtcatctgggagtctgaaaactgtaaaattgagttgcctactggaactggagtctgtcttgacaataatgttcaattcaattcggattccgatcgtatcacctctctcaatgcattcaatagtatgatccgagctcaccaggctacattttcagaatttttatgcgtctatgaagagtcctttgcttccctgactggagaaacgaccttcttgaatgagaatgcccaaaccatttcgtttggagtttttgatgatggtgtgctgatggctgagcatatgatttgtcataagattgcggatcctaatatacggcttcaaggtggagcctttgcgaaggtgggcaccgtgacctataggcagggcgatgcgcgtgatctgaccaaggaaatcgaggatgactgtgactatcttgttggcagagaagtggccaagggcaatgcgcaagtcgttcctacgggacaggcgacggatgcaacggtggctccaaccaccgcaagagactctgggccagagaagaaacaagatgcccttcaagaactcaatagcctgattggtcttgaaaaagtcaaacatgagatcaagaaaatgatcaacatggtggaatttaacaagaaacgaatcgccagtggcaaggcacctgaaaaacaaaccttgcatgctgcctttatgggaaatcctggtacagggaaaacgactgtggctcgtctgttgggaaaagtgctctttgatgcgggtgttctctcaggggaagaattccgtttcgtggaagcaacggagtccgatctgatctcttcaaatattgggggaacggctgaacagacccaagccctgcttgaaaaagcgcgaggaggcatcctctttattgatgaagcctatagcttggataaaaaggatagcggtgcggattttgggatcgaggcgatcaataccatcctcaaatttatggaggacaatcgcgatgacatcatgattatctttgccggctataccaaggaaatggaagagtttttaaagactaatccaggcctccgttctcgggtaccaaataatttcatctttgaagatttcacaggagatgagattgtccaactgggtgaaatgatcctaagcaaaggagactacaaactcgaagaccgggattactatgcgcggcatgttaagcgggcttatgatggctcgctagataagagcaatggtcgctggatccgtaacctggatgagcaattgaccaagaccatggcggatcgggtggtggcccaaggttctgacgatattgagaccatcctcaatagcgatatcgatgctgtccttaaccaaggtaagtatcaagcaggagccgacaaggaagaagatgggatggctgccctcaaccgtttggttggaattgctaaggtgaaagagcaagtcgaacaattcgtagccatggctgagttcaatcaaaaacgggctgaacaaggtggcatcgtcgaagacacgaccttgcactctctctttcttggaaatcccggtacagggaagaccaccgtggcccgcattttgggcaatatcctcttccaaaaaggggttatcaagcagaagaaattcatcgaagtttcgcggagcaatctggttggaggctaccaaggtcaaacagccttgaagacgcgtgaagttttggagagtgcactgggtggagtcctctttatcgatgaggcctacacgctctataccggtttaaatgatgattttgggaaagaagccttggacgaagtcctcaaatttatggaggaccaccgccgcgatatcgtcattatctttgctggttacacgaaagagatgcacgacttcttgcaggtcaattcaggtctgcaaagccggatcccgactacatttgattttgaagactacagcccagatgagatcgtggagatcggtctgttaggtttgcgtaagcaaggttaccaggtcaatgaagccctttatggagagattgtgaaagggaattatatgcgtgccaatgaccatagtaatggtcgctgggttcgcaatctcaatgaaaaactcttgcgccaagtatcaactcgggtaacccgtgaaggtagtacagactacaattccattttggatcaagatttggaagcattgagagagaatagcagttctgaacaaccccataccgtggatgatcaaggttatgttcttccttaagctagaaggatcaataaaaaggaggctgggacaaaagtcctagtctctcaattatttttggattgtcgagcaagacgcagtggttgagtgggctctactacgctgaattcatcagcttttacagccctactcaactgtgcggaggtgggacgacgaaatcgaattctaacgaattaccgatttctgtcccactctctttttgcatggacttatggtatactaggagaagattattcacttatgaaggagaaagcaatggttttaccaaattttaaagaaaatcttgaaaaatacgctaaattgttggttgcgaacggcatcaacgtgcaacctggccataccttggtcttgaacatcgatgtggaacaaagagaattggcccacttaattgtgaaggaagcctatgctttgggggcgcacgaagtgattgtccaatgggcagatgatttcactacccgggagaaattcctccatgcaccgatggatcgcttggacaacgtgccagactacaagatcgcggaaatgaactacctcttggaacacaaggctagtcgcttgggtgtgcgctcgtctgatccaggtgccttaaatggtgttgatgcagagaagctttctgcctcagctaaggctttgggcatggccatgaaaccaatgcgcatcgccactcaatctaacaaggtcagctggacagttgctgctgcagcaggtttagaatgggcgaaaaaggtcttcccaaatgcggcgagcgacgaggaagcagtggaccttctttgggatcaaatcttcaagacttgtcgagtgtatgaggaagatccagtcaaggcttgggaagagcatgcagctattctcaagagcaaggcagatacactaaataaggaacaattctcagctcttcattacacagcacctggaacggacttgactcttggcttgccgaagaaccacgtctgggaatctgccggagctatcaatgcccaaggtgaaggtttcttgccaaatatgccgacagaagaggtcttcacagctcctgacttccgtcgtgcagaaggctatgtcacctctacaaaaccgcttagctacaacggaaacatcatcgaaggcatcaaagtgacctttgaaaatggagaaattgtggatatcacagctgaaaaaggcgatcaagtcatgaaagacttggtcttcaaaaacaagggagcgcgtgctttgggtgaatgtgccctcgtaccggacccaagcccaatttctcaatcaggcattaccttctttaataccctttttgatgaaaatgcctctaaccacttggccatcggagcagcctatgcaaccagcgtagaaggtggcgcagaattcacagaagaagaactcgaagcagccgggctcaaccgctcagacgtccacgtcgacttcatgattggctcaagccaaatggatatcgacggcatccgagaagacggcacccgcgtcccagtcttccgcaacggagattgggcaatatagggagcaaaacagaaatcagtaactcgaagagtttgatttcgtagttttgcccccgcacagttgattaggaagtacgagtaccgtaggtaggagtagttccaatcaacccctgcgccaagagacagaaatcggtagacgcagtctcgatttcgtagtcctgcccccgcacagttgattaggaagtacgagtaccgtaggtaggagtagttccaatcaacccctgcgccaagagacagaaatcagtaactcgaagagtttgatttcttcctcgccttttggattcaaggctcgggcaaaaaaggtccacaggacctttttagtacccccgcacagttgaatagactggacgaagaaccgaaaggttcgagtaccgtcaatcaaccactgtgctgagagatagaaatcggtagacgcagtctcgtaaaaaaagtaaggtagtagtgaatcatcactactaccttactttttgtcatttacgctattctaaaatcaagagaccttctttgatttcaaatgggttgtttgggttgatgcggtcatagaacatgatgccgttggtgtggtcgatttcatgttgaacgacgatggagttgtagcctttgagtttgatgcgtttcttttccccatcttttgtgaaatactcaaccgtcacgcgggcatgtcgaaccacatagcctgggacgttgcggtctacagagagacagccttccccgtcgccaagcgcagcatcttgaacagaatgggcgacaacctttggattatacatgacttcttgaaggctataggcttcttttggtgggttgccatcggcatcttctggattgggaaccaaaacagcgatgattcgtttagagatatctagctgaggggctgcgagtcccactcctccacggaggccaagtttttcagccatgacagggtcttgagaatggtgcaaaaattgcatcattttttcacccaggataatttcctggtcagacaaagggaaggtcacgtcttctgcaacagctcgaagtgttggatttccttcgcggataatgtcatccatatcaatcaaatgggacgctcttgtaactttttcaattgctttcatcgttttactctcactttctttctactctccatgataacacaaaagagcctaaaattaaagttatctgtcgacggtttccgcatgtttgatggacaaatcattcatccttcttgcatctaaaatcgtatagatccgtccttctctttggactaagccctcttcgatcatctgcttgatgacgcggctaaggtggcggtagctgatcccaaaacgcagggccagctgattcatcttgggcttgagggtcccattttcatcgcaatgctccagaaaatgcgtagcgaggcgttccttgaccgaataatgaaagttagcaggagccaaatagttgatctggtgcaatttctcagccaaggtcttggccgtagagcgcaagaaggttggatcaagcaggaggcgcttcttaaagtgctgggctgggagctggacgactagcgagtcttggtctgcaatgaccgatgtgatacagactcgatcgagcaggagctcaatctctcctaagagtccaggtttttcttggatttcaaggatggtgtcgctgccgttttcaagactgtggataatcttgagtcggcctttgagaaaataaggaatgacatcttgctcagagccttggcggcagatataatctccagcctgatagagaacgaggtccagctggctaagacagtcgcctggaaatatttggtccaattggtagtctgtgatgatatccttgagtcttgtagatggtgtagatggggaaatttttttcatcttaatctcctaaaataggacaaatgtcctgtttttctatttctaaattgattatactaggattctattgaaaattctagtttgaatcttttctaaaaaaactagtaaaatcaaaatgttgccagtaaagtgtaggaaataaaaaatgaaaaaacaatggaaagaatcagtctcttgagcttgtcgctcatgctgatctcatctttttcaattacagctggtttgccggctatgaaggcttattttagtcacttcggatattcagcaagtcaggtagaactcttggtttccctgccagcctttgcggtcgtggccatgctcttttttaatagcgtgatcgagcggtggatgagtgagcgccagatgattgttgcagggctcttgctcttttcaactagcgggcttttgcctttggtcgtgcaggactattctctcatctttctaagtcgtttgctctttggcttggggacaggaatgatcaatgccaaggctatttcaattatcagtgagcgctactcaggcaatgataagactcggatgctgggatatcgggggtctgctgaagtagtgggttctgccatcttgacctttattgtgggacaactcttacccctaggctggccagcgatctttgccgtatatggtggtggttacttgattttactcctctatatcctttttgtcccttatcctaaggagaaaaaacaggctatcttgaaggtgaaaaagtcaggatccgtccgccttcgctcccctcaatggcgttttagtctaatgctagctgtgattgctggtatcatcatttgcttcaattctatcattagcctacgagtgccggatatcattgttgacgctcgtatgggaacagcggcaacagctggaaccgtcttgagtctgatgcaattaacagggattgtagcaggggtaggctttgccagtttgacacatgttttcaaaaagaacttgctcatgatcatgtgctttggtttcggactagctctggccttgattggcttgtccggacagctgtggagcctggttctaggaaccctcttagcaggatttacctacagtatgggagtcaccagtatcttctatcacctatctgaaaaaatcccgaccaatctcctgaaccttgcgacctcgctggtcttgattggctgcaatctcggatcagccctctcttctttcttcatccagttggtgacgccactagctccttccaatcacctgctctttgtctggattggcgctttgatggtcggaacgggagtcttcgcctcgcaattgttagcacgaacgaaatgatggagaaatcatttcgtttttttaattcaattgattgcgtcctgtcactagctcgtgttattataggaggagtgtgaaaaaagattagtttaaaggatagaataatgaaaaaaatcatggagaaagtgagtattctcgcgctttcatttattttgacgacctcgttttcgatttcgagtgcgcagtcggccatgtttgcctattacaagggaattcctcacagcatgattgagctcttggtctcgcttccttctgccgggatcatggtttcactcatcttcaataaatggattgggcgcctattttcagagcgtcagatgattgtgacaggcttagttgcttacgctctatgtggctttattcccttaatcagtccagcttatccggttgtctttttgtctcggattattttcgggatggcagttggtttgctcaatgtttctgccattgccattatcagtgagcgctataaagggaaggaacgcgttcaaacccttggtattcgtggttctgcggaggttgttgggacggccgttttaacctttggagtcagccttttgattcgctttggctggcaggctgcctttctcgtctacggtatcagtattcctatcttacttttgtatctcttatttgtgccatatggatctacgacggaagcagtggaggaaaaacaccgggatgtcaagatgacaggggggcaatggcagacagcactcggcttagcggtcgttgcggcagctatcgtcttgtctaatgtcatgatcaccgttcggattccaagtgtggtagagcaagtgggacatggaactgcccaaactgctgggattattttagcagccatgcaatttgtcggaattttggcaggtttggccttctcgcctttaacgcatctcttccgcgatcgtttattattggtttcgggagtagcttttggtgtgacccaactattgatcggtgtctctccaaatctcttgattcttgcccttgtaaccattgcttctggcttcgcctacagtgtagctcttacaacagtttacaatgtcttatctgataagatgccagcaggggtcttgagccaggcaacatccattgcagttttgggatgcagtacaggttcgatcgcaacgacctttgtccttagtctattagggacgatctcatctgctccagtctttatttttggattttctggtatcctcatgatcctggtttcattttttggcctttggattgtgcgaaagagcaggaagtaattatgcggctagataaatttttagtggattgcggcgtggggagcaggactgaggtcaagcaactcctcaagcaaaagaaaattgcagtgaatggaaaaaaagagacagcaggaaagctacagattgacccaggcaaggatcgggtgacctttatgggggaagacttggtccatgaaaccttcgtgtattatctgctcaataaaccagctggggttatctcagcgactgaagatgatcaccaccaaactgtgctggatctattagatgagacagcccgtcataaggaagtctttcctgtcggacgtctggatatcgatacctatggcttgctccttttgaccaataatggcaagctcgctcatgccatgctttcgccgaagaagcatgtgtcgaagatttaccgtgcccaagtagctgggatcatggatgaggcagatgtagcccgttttgaagcaggcattgccctcaaagacttcaccaccttacctgcgagattgcagatcttagaggtgaatgaggcaaatgccagctcctacgtcgaaatcgaaatcgctgaaggaaaattccatcaggttaagcgtatggtcgctgcctgtggcaaggaagtggcggatttagagaggatctctatggggcctctaacgctagattcaactcttcaattgggagcatggcggagactccatccttctgaactcaagtccctagaggtcttcggagttcccttataagcgaaaaaacaagcagtctgactttaatggactgctattttttatttgtatcaataaaatgaactgaataggcaaaaatgaaacaattcgcttgtgctatcaaaataaattgattataatgaaaaaagataggttgtgcgtaaattcacaatatgtagtgataatttttttactaacataccatatctagtaaacgtagaaaaaggagaaaaatcgtttatgaaaaagtggctctattctgttgtgacaacagttgccctatttttactagtggctttaggatttgccaaaacggataggattaccaaggtacatgcggatacgatcaatagtatcattacatccgtggagttttcgaagtcctctgggggatctctaacagatccgattggtgtctgggaaagttttcaagtaaaagcgaagtttgagttacccgatggacaagtaaagtcgggagacaagacagaaattgaacttggaaatgattttaaagtcttggaaatggacacagttgacctactggatcctagcggtcaaaaagttgcgactgcgacggtagacaatcaaagaaaaaagattacagtgacctatacagactatcctgaaaaaatggctcatgtgacaggttcattgcgtttctttgtgcgtgtggatcaccaagttgtcaaagatcagaaaacgcttgattttagtctttctattaatggtgtgtccaaaccgtttgggaaaattgagtacaaaggggtcaatccgggtgaaaatcctcctactccagaagtctttagcaaatggggatggaccaactcagatgataaattaaaattgacctataccttgaacatcaatcaagggcataccgccctccataatattgatattaaagatcaattggcttttacagatggaaagatcaaagcagattctgttaatatccatacaggaacttggaggatcagtgacgaagatggggcatatcatttaagagacaccacgaacgtcaccaaggactattctccggttgtcagtgctgatggtcaatctctaacggttcacattggggatctagctcccgagcaaggaatgaccattcgttatgatgtctatttggacaaggtaccggtgatcaatacagcttacaaaaatcatgcaactatgacagctacggaggtcgaggagcaaactaaagacgcagtcatcctgtaccaattccttgaaggaaactttaatggtgaaaaatattcattcactatccataaaaaaggagaaaatggtcaggctcttgcaggtgctacctttgctgtgacagcagatgatacaggtgagcaagttgggatcatcacaacagatgaggatggtgttggaaccattactggcttgatcaagcaagcttatacggttcaagagattcaagctccaacaggctataatctcttagaagagccaatcaagatcagcaaggacgattttggaaatgacctcgcaatttctcgtgatgttgtgaaccaaaaagaaaagaccagcatctctggtcaaaaaacatggaatgacaatgacaaccaagatggcaagcgtccatcaaaaatcacagttaatctcctagcaaatggtgtcaaagccgcttctaaagaagtgaaaccagatgcaacagggaattggacctatcattttgataatctcgatgtggtcgatgatgctggaaatgtcattgcctacactgtttcagaagaacctgttgcagggtacgaaacaactgttgaaggaacgaatattactaacaatcgtataccagacatgacagaagtagtggttaagaaagtctgggatgataaggaaaataaagacggtcttcgtccagaaaaaatcagtatccgccttcttgcagatggtcaagaagttgctgtgaaagaaatcacagcgactgataattggcaggcaagctttacggatctacctgtatacaaggacggcaagaagattgtctacaccattacagaggatccagtagctggttatacaagcaagattgatggtttcacggtaacgaatcgtcatatcccaccgacgactccaccgacaacaccacctacaacccctcctacaccgccatcgacgacaccaccaaccaccccgccaagcacaccggagaaaccagaaactccaactacaccaagagaaggaaagaaaaaaattcttccatcaactggtgaagttattgcttacgggttgaccatactcggtgccctcttagcagtttttgctttggctttgctcttgcgtggtaaacggaaagagaaataagcttcataccgataaagaggctgggacaaaagtcctagcctctcaattatttttggattgtcgagcaagacgcagtggttgagtgggctctactacgctgatttcatcagcttttacagccctactcaactgtgcggaggtgggacgacgaaatcaaattctaacgaattaccgatttctgtcccactctcttttgaataagttgcttgaagaatgaattcgttaagctgtccaaattattgaggttctttatagaaaagagaaaagttcctctcttataaactcatcttaaaggaaacataagtgtttgacagaaagatgaaatcttggtagaataagaaggtcgaatagacaactaactctttcttggtagcaggctatgccaaacctgccactcggatagagcataaagaaaaggagcttatcatggcaatctcaaaagagaaaaaaaatgaaatcattgcacaatacgcacgtcacgaaggtgacactggttcagtagaagtacaagttgctgtccttacttgggaaatcaaccacttgaacgaacacatcaaacaacacaaaaaagaccacgctacttaccgtggtttgatgaagaaaatcggtcgccgtcgtaacttgttggcttaccttcgtacaaacgacgttaaccgttaccgtgagttgatcaactctcttggacttcgtcgttaatttaagatacaaaggcagtcaaaagcacaaagcaaaaataggaaaattgacgaagaagcttcagcttctaggagattttatcttttttgccaagtgcttaggccgtgttcaattgaatacaaaagttaagttactctattatagggtgacttttcttttttactagaattatagtacaatcttcggttcgtcgccttgtctagaaacgttttatccagcaaggatggagccctctgaattcagagggcttttttgttaattttgatagaatatactcaagtataatcttcggctttggttcctagcatcgtaaggtaaaatagaccagatctgtctcccttcggggagattttttgttttcaccaagattttagcccgagctcaaaacagctctctggattcagagggctgttttgttgtcttttccttatcgaacaagatccatcattctgagaagtcgttttgtttgacggatgtaatatataaagttacaatggatgcatcataagaaatagaggttatcgctatgattgatattacatatctagacggtgcaaaacaagaaagagtcatgcattttgattcctacgaagagtttgaacgctcccaacaagcctgcttgattggggtagcagatttttatcctgttgtgaaactgacctataatgggcatgaattggattaccaagggacttacggagatgtcttcttctatttgatgaagcaagatttgacgcagtaccaaaactaaaggagaaagaaaatggcaaaagcaattacagacgcaacatttgaagcagaaaccaaagaaggcttggtcttggtagacttttgggcaacctggtgtggtccatgtcgcatgcaagctcctattttagaaaaattatcggaagaactttcggaagatgagttaaaaatcctaaaaatggacgtggatgaaaatccagaaacagcgcgtgctttcggcattatgtccatcccaaccttgctctttaaaaaagatgggcaggttgttaaacaagtagcaggagtgcataccgcagcacaaattaaggccattgtggcagagttgagttaatatcataagcacacttccagtagtaaaatgggagtgcttttatatatccaaagaaagagccctgccctcttaaatgaggagcaaggctcttttgtcttcaataatttttttcacgaaaagtgacttgaaaatatttggagggttttacattcactgtgcaatagttagtattgaaaagattgaatgacttttttcaactcatcttgtaaaacgtttctttgatcaagttgaatatagacttctaacagacaggatctaaggttggaaaatttataaaaatcttccctttcttctatcagaaagtcaagcgtttttatccaagaagctacttgttcttgctcgatttttccttgcaaaataggttcatagagcactctagctaaacgccaatcttcatcatcagtaaaacgaattgaaattcttttaaagatttgaccaagtgtgttaaagactttatgaactttgtcattaggaaagtccggatgacaaactacttctgtcaaaagatcagctccatgcgcaaaagcgtgaacccagccatactgactggaaaaacctgttgtatccttttctttttcaagataatgtaaaccttgatccagtaaaatatatcttatatcagcttttaatctttgataaaaaatcgattgttggttggcatctgcagacaagagattggcataaacgagtgctctaaaagaacgctcaagtgttgatagcccaatcttatcaatctctttttctattccttcgtcggatgaaatcgtctcagcaatgaaatgaaattgttcccgtgtaaagagttcttcctgaatccctctagccaagcttgtaaaaacgagatcatcgcgaatttctggtgaaggatcacccaaatgttccagcaaccactggatttcttcccgactatagcttggtttttcttctgtcactttactttgtaattcttgatacatccctagcacctctgcatttttactagcttattttagagttagctgtagaggagtttattctcccaattctgcactgtaggcaatgatttgatccacagtgtccgaaaggaattggatggtatcgcggagtggtttgtcagttgagatatctgctccgatgatcatggctgactcaagtggggtcttgctgccacctgatttaaggaggtttagccaatctttagctccgttttcggagttcttcaaatgcaggtaacccgctgttgagataaccaagccagctgagtaagtgtagctgtaaagccccatatagtaatggctttggcgcatccaggtcaaagcggcgtcatcatcgatctcaacggcgtcgccccagaattctgtcaggacttccttcatgatgctgttgagcttgctagcaccgaaggtaccaccttcttcgatcaaggtgtagaccttgcgttggaaagctgcctccaacaagtgggtgatgaagttatggaagtaggtatctgtcaaacggtgagccaaggcaaagcgtttttgacgagggtcgtcaaactggtgctccaaatagtcgctgaggaggagctcgttaaaggtagaaggagcttccacatagtaggtcgacatgtgggcgttgaagtagctttggttgttgtctgagaagatgaattgaccagagtgtccgatctcgtggatcagagtgtagacatcgctcatccgtcctgtccagctcatgaggacataaggatggacgcggtatggatcggccgcataaccaccagaatccttgccttcattggccgcaaagtcaacccagcgttcagtttggtagcgggcgatttcgcgtgagtattcttctccaagaggtgctacagatttcatgaccaagtcataagcgtcgtcaatggtaacgtcagggttgagcgcactgtccaagtccagcttccaatcagcaaaggtcattttttcaaggccgttgaccttggccacgtgtttgaggaatttttgagcgaccggagcaaagtccttcatgatcaggtcaatctgacgatcaaacatggcacgatctacttcctgctcagctaagagatagtcaaagacagaatcgtagcctctcatatctgcaatcagtttttcagacttgacttgagctagataggtagcagcagccgtgttttggtgcttgcgaagaccttctgagaaagaacgaaaggctttttcacggatttccgcattctcatggttttggtagaagttttcataggtaacaaagctattcttgtagacttttccatccacttcaaaatcagccatttcaaagtcacctgcccgcatcttggtatagatgtcttgtggtccgtagaagacttcacccaggttggtcaaggtcttttccacatcagctcccaagtagtgagcttttttaattttagcctgacgaatggcaaaagtgaggtgagggagttgccccaggcgttcgaggacttcttcatccgcttctaccaaagcatcatcaaagaaggaaagttcgacgcttgcccaagtttcgaaatccatccctgcttgggcaatctctgcgaaagcttcatcaccaaagtcagtggtttggggcataaagctgtagttgccaatgtggctgagttggatctgaatttgttcaaagaccgcaaaggcagcttcaaagtcttcaaaggtgtggaggttgcccttgtaattacggacaaattcattgatttcttcacgtgttttttcaatggcgcgcaagaagtcttcctggtcttggtagagggctgtgaggtcccagagttcgttctcaggaaattcagaacgtttttttaattccataatgttctccttttgattggtgttcttccttaagtatagcagaaaacaggatagaaacatagggggagaggggaaaatgcttgtgtaaaaatcttgaaaagagctggaaaaaatgaccatttttgatatactaggatagagatgaggaggtttttatgaaaaaggtcgtgatttcactactggcgggtgcgtccgttctagctctagtggcttgtacgcccaaacgttatgaacgccaaagtaaaccaaaaacggcaacgtcatcatcggttaaaaaaaaagaaggatacaggtcagaagtattatcaagaggttttggagcggtatgctaagtatgatacagctcttaaaaatgacgataaaacaggcctgtttgcggaattaggtaaaatacaatccggttcagaagaaagcacctatctagatgctttggagtgcttgggaactccggtaacctttcagtatgcttttacagacttgaacaaagatggtgtggatgagctcttggtgtccaatcaatacacggaaaacaaacagtatgtttctgccatctattacctcaaaggtaaagaagccgaattgctgcatacagcttatacagctgcggtgggtggctatcgctccagtttagaagttttcgataatagacaaatcgtttatgctacttggcaatccattaatccagaaatggaattgaccctttattcgctaggaaaaggggaagccaaggaagaaaagaaagcaaccattcaaattggtggggaccaaacagcagaacaagctcttggggtttcagccaagaagttggaccttagtaagcttgactggaaaacttttgacggttcaggcgactctaaatcaacagcaaaagcagaagagaaaaaattagtaagcttccaagtacaagttagcgtagccgatcttcgtattcgaaaagaaccgtctacttcagctccatctgcagggatgatcgcaaaaggcattcacaccattacggaaacagtggatgcggatggtcatacttggggcaagcttgaatctggacaaggctggatcgcccttgaattcacaacgcgtgtggatggttctaaatcagcaagctcaagtaagaaaagcagcggaatgaatattcaagaaattcagaacggtgatttttcaagtattgcaggaacctggaaaaatgggaaaggttggacgcttgtatttgatggaaatggatcagcagaacaggttttcttgaatggtgaaaatatgctggtcaatcgaattcaaccaacggataatcatcttagtggaggtttcagtaatcctaagcataaggttggtggtgcgattatcagatttattccggcaggagttactcttcctgtttatgttgaacagaaagcagatccttctgatagtgggaaagatcgtatttgggcaggtcaatcagcatggtgggaagagagtgacttcttctaccgtgtggactaagaaaataaggagacaaacatgaaaaaaattggaacatatttactagctacagccctcttgctttctctggcaggctgcgctccgaaacgctatgagcgtaagcacagtcctgtaggagcttcatcggtcaaaaaatcatctgaccaggcacaagaaaaagagaaaacagaagaagctaagtcagatgaaaatgataaagaagccattgggaccttgtcaaaagcagaccaagcggatatctattcgatcattgaaaacagtgcgtctttgacctattcacttcaggtgcaaccgactcgtttgctggagttgaataatgatcacagtgcagttgaaggctactcgcaagacatgttcattgattactacaatacctacacgccagaaacctataatttacaagatatcattgataaattgaatgcagaagagacatcggactctattcgcagcctttcacaagaccagctgatccaactaacaaatgaaaagaaagacggctggatctattcgacaaaagacaaggccttctacgaaattgtagctggtggtcgtggcggagcgatgccaccgatggaaatcccttcaccagatgaatgggtggtcaatgaagattcagttgaagtgacaacgactatccaaggcacttctgaaccctacagacgttttgtcttgaaacgcaacaacaagaactacaagggtggaacccacaaaacacgcttttatgtcgacagcacagaatttgtgaaatcataaaaataaataaaggctatatctagctctagaattttaaaataggtggaaatcaaatattcctcgaaaaaggcttttaaagcctttttcttttggacttgaatatggtaaaataaaggttatacgtgcttggatacaaagatgaggatataacatacagtaaggctgttgcaatccatgctatcatgcgtaattgaactcggccgaaaagctgtgtaaaaaagataaactgtcttgtcttcatcgaagacttcgccagtttcctatttttactttgctttttgcggccttagtatcttgatctttgtaggcaagtcgtataattttatcaatccaaaggggattacaatgacaaaacaagtgtttcaaacgacttttgcgggtcgtgagttaatcgtagagacgggtcaggttgcgaagcaagcaaatggcgctgttgtcgtgcgttatggtgagtcaactgtcttgacggcagctgtcatgtctaagaaaatggcaactggggatttcttcccacttcaagtcaactacgaagaaaaaatgtatgcggctgggaaatttcctggtggctttatgaaacgggaaggtcgtccttctacagatgcgaccttgacagcgcgtttgattgaccgtccgatccgtcctatgtttgcggaaggtttccgtaatgaagtgcaagtcatcaacacagtcctttcttacgatgaaaatgcatctgctccaatggcagccatgtttggttcatcattggctctttctatctcagatattccgtttgacggaccaatcgctggggtacaagtaggctatgtggacggggaaatcatcatcaacccaacgcaagaacaagcagagcgctctcttcttgaattgacagtagctggtactaaacacgctatcaacatggtagagtctggtgccaaagaattgtcagaagaaatcatgttggaagctcttctcaaagggcacgaagccgttaaagaattgattgccttccaagaagaaatcgttgcggcagttgggaaagaaaaagcagaagttgaattgcttcatgtagatgctgacttgcaggctgaaatcatcgcagcttacaacagcgaccttcaaaaagcagttcaagttgaagaaaaattggctcgtgaagctgcgactcaagcagtcaaagaccaagtcacagcagtttacgaagaaaaatatgcagaccacgaagagtttgatcgcatcatgcgggacgtggctgaaatcttggaacaaatggaacacgcagaagtgcgccgtttgatcacagaagacaaggttcgtccggatggtcgtaaggtcgatgaaatccgtcctttggatgcacaagttgactatcttcctcgtgtgcacggttcaggtctctttacgcgtggacaaacgcaagccctttctgtcttgaccttggcaccaatgggtgaaacgcaaatcatcgatggtttggatcctgagtataagaaacgctttatgcaccactacaacttcccacaatactctgtaggggaaacaggtcgttacggtgcgcctggtcgtcgtgaaattggtcacggtgctcttggtgagcgtgcccttgctcaagtattgccaagcttggaagaattcccatatgccatccgtttggtagcagaagtattggaatcaaatggttcttcatctcaagcatctatctgtgcgggaacacttgcccttatggctggtggtgtgccaatcaaggccccagtagctggtattgccatgggtctgatctcagatggaaacaactacaccgtattgacagatatccaaggtttggaagaccactttggagatatggacttcaaggttgctggaactcgtgacgggattacagcccttcaaatggatatcaagatccaagggattactgcagaaatcttgacagaagcgcttgcccaagccaagaaagctcgttttgaaatccttgacgtgattgaagcaaccattccagaagtgcgtccagaattggcgccaactgctccgaaaattgataccatcaagattgatgtcgacaagatcaagattgtcatcggtaagggtggagaaaccatagataaaatcatcgctgaaacaggcgttaagattgatatcgacgaagaagggaacgtatcaatctactcgagcgaccaagatgcgattaaccgtgctaaggaaatcattgctggtttggtgcgtgaagccaaagtggatgaagtctaccatgccaaagtggttcggattgagaaattcggtgcctttgtcaacctctttgacaagacagatgccctcgttcacatctctgaaatggcttggactcgtaccaaccgtgtcgaagacttggtagcgattggcgatgaagtggatgtcaagattatcaagattgacgaaaaaggtcgtgtcgatgcttctatgaaggcactcttgccacgtccgccaaaacctgaacattcagaagaaaaaggtgaaaagggtcctcgtcatggcgatcgtcctcgtcaccacaacaaagaccacaaacctaaaaaagactttaccattacacaaaaagattcagaataatcattagaaaaggaggagcacggtatgggatggtggcgtgaaaccatcaatattgtaaaagaaaatgacccagcagcgcgtacctcgctggaggtccttttgacctatccgggcgtcaaagcactggcagctcaccgtgtttcccactttttgtggaaccatggatttaagctcttggcgcggatgcacagccaattttggcgtttttggacccagattgagatccacccaggagcaactattgcttctggtgtctttatcgaccatggagcgggactcgttatcggggaaacagccattgttgaaaaaggtgttatgctctaccatggggtgacccttgggggaacaggaaaggatgtcggcaaacgccatccaacggtacgtgaaggagccttggtttccgcccatgctcaagtcatcggcccagtggaaatcggagcaaaagccaaagtaggagcaggagctgtcgtggtctcagatgtaccaagtgatgtaaccgttgtcggtgttcctgccaagattgtgcgggtacacggtcgaaaagacgaaccagtcattcatcaagaagaagaaaaacgggaatactacatgaacaagctggagcatgctaaggaagctagccatcggtcttcgagcttgtaaggagatcgctacgtgattcaatcaaccaatacattgaatgaccaccaactactggaagcaaaggcccttattgccatctgtcagaagtatgacggaacgtttcgggatccttatctctccaatatgctcaattttgaccccgatatgcctgcctttttcctttattatgaaaaagatgaacttgttggcctattaactgtctatgcggatgacccagatgtggatgtggcgatcctggtccaccctaatcatcgtcgtcagggaatttcgcgtgctttgtatagaagttttgagaaagaaacggcatcttatccaattgagtctgtgacttttcagacagagcgtatttttctagagcgccatcctgattttgccagcaattggggactggttgaggatgacgaaacagaaacctggttaggacgtgatcgaaccacttatgcattagattcccgttcggatgtcgatgtgctcttggcagatccttcttatcttgaagccattgcccagctccaccaccaaaccttttcagatgaagtggaagcaccggaagtgagccacagatacatttcagaggctttgaaggatcctgatagtctgctgtacatattactcaaagaaggtcaagtgattggcgtttgtacggtcgatgtgtctggaactagcaactacctttatggacttgcgattgctgaacttgaacgcggaaaaggctacggaagctatctagcaaaatccctcgtcaaccaactcatggagcaaaatgataaggaatttcagattgcagtagaagatagcaatgttggtgccaaatacttgtatgaaaagcttggctttgtcacacagactcaggtggtttacttgaagccaaaagagtagaaacagaaaggaaatgaagcgtgttaaaaatttatgataccatgtctcgtgatttgcgagaatttatccccatcgaggaaggaaaggtccgcatgtatgtttgtgggccaacggtttacaactatatccacgtagggaatgcccgctcaacggtggcctttgacacgattcgtcgctactttgagtatcgtggctacgaagttgcctacatttccaactttacagatgtggacgataagatcatcaaccgtgccaaagaagaaggcattactcctcaggaagtggcagacaagtatatcgctgcctttcgtgaggatgtgacggctcttggtgtgaaacctgcaacccgccaccctcgtgtggtcgagtttatggatgatatcattcgttttgtcgctgacttgatcgaaaaaggctatgcctacgagagccaaggcgatgtttatttccgtgtggaaaaatcccacaactatgctaaattagctaataaaaccctagaagacttggagttaggagcttcaggtcggacagatgaggaaacagctcgcaaggaaaatccagtcgactttgccctctggaaagctgccaaaccaggagagatttcttgggacagcccttggggacctggccgtccgggttggcacatcgagtgttcggtcatgtcaacggggattttaggggatacgatagatatccacggtggtggagctgaccttgagtttccgcaccataccaatgaaattgcccagtcagaagctaagacggggaaaacttttgccaattactggatgcacaatggctttgtcaatattgataatgtcaagatgtccaagtccttgggcaacttcattactgtgcatgatgcattgaagactatcgacggccaagtgcttcgcttcttctttgcaacccagcactatcgcaagcccattaacttcacagaaaaagcggtgcgcgatgcggagaccaacctcaagtatttgaaaaacacctatgagcaaccgttcacaggagaagtggatttagcagacttgcaaggctttgtggacaagtttatcgcggctatggatgaagatatcaatgcggcaaacggcatcactgtcgtctttgaattagctaaatggatcaattcaggtcactacaaccaagacgtcaaggatgccttgaccaagatgttagaagtctttggagtggtctttgtcgaagaagtcttggatgcagatattgaagccttgatcgctgaacgtcaggaagcgcgggctaagaaagattttgcgcgagcagatgccattcgcgatgaattggctgcgcaaggaatcaagctcttggatacaaaagaaggtgtaaggtggacacgtgattgatgtcaatctgattaatgggattgccctagcctttgagggagatgcggtctattccatgtatatccgtaagcatttgattttgcaagggatgaccaagcctaacaaacttcaccagactgcaactaggtatgtctctgccaaggctcaggctaatctgattgcgatgatgcttgaggaagatgttttgacagtgaaagaagtcgaaatctataaacgcggtcgtaataccaatagccataccaaggctaaaaatgccgacgtcgtgacctatcgtatgtcgacaggctttgaagcggtcatgggttacttgcacttgacagatgaaatcaaccgcttagaagaattggtagcttggtgtatccaaaaagtggaagaagggataaagtagtgaaagatatcagagagtggttccctcatgctgaggtgacggatcaaccgactccaccagcgggttttgtagctatccctcttcaggcccagcaatggctgcaactgaaggaagaagagctgacggagagagagaagcaattgattgcctggttgggcagtgaggaagatctggcccccaatccttggtaccaatacctgatcgatgggaagggagaagcccctcaagtcatcaaaaaaatgcaacttgtctattgccgcctctcacattcgacagcagaaggaacagcttcctggttagagatgatgcagacgcttttgcccaactttcgagcagtcttgcagctgagtgggcaggactatgtactcattctggaccaagagcagtcgttgcctgtagctgctatcttaaaagataccgtatctgctatggagtatgactttaatcttcgcttatccattatggtcgggcaggtatggaccgagcctaaggattggagactgtcttcagtcattcgagcagaacgagaagtctttagaggctggatccgagaagggcatcaaggtgtttaccacttttctcaactctatctgtggggaatcgaacaggaagatttggatctacatcctatcaaagaacgcttgcgtcaattgattgcgagtcaagatcagttgcaggacatcattgttgcactttgggacaatggagcagttgtaaccaaggcggcccagcaactctatctccatcgcaattcccttcaatataagatggataaatgggaggagctaacgggtctccagttaaaaaatctgacagatctagccctttgttaccatttggtattacaagatgtgatgtaaaggaatcaatccagagttttgtgcaacttgcacaaaactctttttcttttttgtgagacctgccatagatttgtaaaacgttttcatttacaatagaactataaacatcaaaggagtaccatcatggtagaattaaatcttaaaaatatttacaaaaaatatccaaacagcgaacactactcagttgaagacttcaacttggacatcaaagacaaagaatttatcgttttcgtaggtccttcaggatgtggtaaatcaacgactcttcgtatgatcgctggtcttgaagacatcacagaaggtgaatgttccatcgatggcactgttgtaaacaatgtggcaccgaaagaccgtgatatcgctatggtattccaaaactacgctctttacccacacatgactgtgtacgataacatggcatttggtttgaaattgcgtaaatacagcaaggaagatatcgacaaacgtgtacaagaagcagctgaaatccttggcttgaaagaattcttggatcgtaaaccagctgacctttctggtggtcaacgtcaacgtgtggccatgggacgtgccattgttcgtgatgcaaaagtattcttgatggacgaacctttgtcaaacttggatgcaaaattgcgtgtatcaatgcgtgctgaaatcgcgaaaatccaccgtcgtatcggtgctacaaccatctacgtaactcacgaccaaacagaagcgatgacattggcagatcgtatcgttatcatgtcagctactaaaaacccagctggtactggtacaattggacgtgtggaacaaattggttctccgcaagaagtgtacaaaaacccagttaacaaattcgtagctggattcatcggaagccctgccatgaacttcattaacgtgaagttggaaggtggacacatcgttgccaatggattgaatttgaaagttccagaaggtgctttgaaagtcttgaaagaaaaaggctatgatggtaaagaattgatctttggtatccgtccagaagacgtgaatacagaagctgctttccttgaaactttcccagaatcagtcgtgaaagcaaccatctcagtgtctgagttgctcggttctgaatctcacttgtactgccaagttggtgacaacgaatttatcgcaaaagtagatgcgcgtgactaccttggaactggtgaaacaatcgaacttggatttgacttgaacaaagctcacttcttcgataaagaaactgaaaaaacagtatactaatacctactgacactatggagactgagatgatttgtctcggtctctttcatttaaggagacaagacatggaaaaagattggtggaaggggaaggtcgcttaccagatttacccaaaaagcttcaaagacagcaatggagatggtgttggtgatttaaaaggaatcacggaaaaactcgattaccttcaacagttggggattgatattctctggttatcgcctgtttacaagagcccttttattgatcagggatatgatatttccgattattatgccattgacccgctttttgggagcatggaagatatggaagagttgattgcggaaggtaagaagcgaggaatttctatcattatggacttggtggttaaccattgctccagtcatcacgagtggttccaaaaggctttagcggatccagatggcccttatgcggattacttttattttatcgaaagtgacaaagaacccaacaactgggaaagttactttgggggcagtgtttgggagccggttcctggcaccaacaaatactatcttcattctttccacaaggatcagccagatctcaattggcaaaaccctgtcttgcgcgaagaaatttacaggatgatcaattggtggttggacaagggaatcgcgggcttccggatcgatgctattatcaatatcaaaaaagatctagaatggcgttcgcttccgtctgatcgcgaaaatggcttggtcccagtactggagtctctagtgaatgcccaatcgattgaacctttcttgcaagagttaaaggagcgaacctttgccaagtacaatgctttcactgtaggagaagttttcaatgaaaccgatgaagaattgcatttcttcattggaaaagacggtgtcttttcttctatctttgacttcaagcaaacttgcttggggcaggaaggaaagggctggtttgaccatactcttccaacagcggaagaactcaaggaaagtattttccaagcgcatgagcgcgcagatagaattggtgttctctcgaccatcatcgaaaaccacgacgaacctcgtggcgtgtcccattatattgcggaaggtccggtaaacgataccagtaaaaaggccttgggaaccattcaaatcttgcgtaagggaattccttttatctatcaaggccaagaaattggaatggaaaaccaagtctttgaatcggtggaggattttgatgatattgcgaccatcaatggttatcatgttgctaaagaagctggtttgagcgaggaagaagccttagcagcgattgccaaatacagcagggacaatgcacggacacccatgcaatggtcagcagaaccaggtctgggctttagcgatgggtcagcctggttgatcagtcccaaaccagatgttgccatcaatgtggaagatcaggaaaaggatccaaattccatcttgaattactatcgccagttgacggccttgtatcgccatcccctttatggaaataccatccgttttggagatatgattccagcttatcgagaccgtgagaatatcattgccttcgaacgccgtggggacaagcgtctcttggttgtcagcaatttccaaaatcgccaggccaccttggagttgccagctccgattaaaacggtcgttttaaataatacttcaggattattccaagaaggagaccaagtgctagaattggtcccttaccaaacggttgtgttggaattggtggaataaggagaaactttgcatcagtgttaggatttaatgtagaatagtatgttcattaaatattctggagaacattataaaagttttctatactttagaatcagtcaagtataaactgaaactttccgctgtgagaaaagtgtttgaaacattattgtttcaaacactcgggagttttgagagtaaaacagtttgggaaactgttttagcctgagccaagaaattaaagagcgaaggggttcaaaacaaattgaacacgggctgcggatcgtgtcaaaaagataagttctcctaaaatctaaagattctgcgtcaaacttcctattttgactgtatccgcagacgccctttgtatcttgatttagtcatggaactttgaagaagttcgctgacgtccgtactcacctaaggaaagttttgaaagatattttatctccagaaagaaccttcgcagatgcgaaggttcttttcatgtcatccaagtctaaagctggaacttactcaacttctttctttttcaagaggaggaagcctccgctaacggctaacaagaagcctgaaagaatgaagtgtgcagctgtgtcttctccagtttgtggcaattgtgccttggctggactttcttggaagctttgtcctacttggtaagtcaaggcttgcacgctttcttctttagttgtcatttctttttgtggaaggagcactttaggagtatccttcttggccaagattggctgtggattgcttgtttggttatgaattggaaccaccacttgatctggttctttagctggaacgtaatccatcaagcttgccaatttgctgccaaagattgcattggttacccagcggaagaagtggacaggatgttgacggttagttggatttcctgcatagacaaagagtggttgtcccatcagttctccagagatggccatgactttgttggctagaacatcgttatgtggccaccaacctgcaatataataatcgctcggagcgatgctcatcaaggtcttgaaatgctctggaaccttttcgatccagtttcctgagttggagtagaagagggtgttctttttgtatccgctggtcaatggatcctgatcatcaatgatcgctttcatcaaaccttcgtagtcactaccgccttttagtttttcagcgtcaaatcctgtaagaactcccaatttttccaatttttgcatggcttccccaccaatgacaagggttggttttttaccaaaaatggaagcgtcgaagcggttgctttccaaaataacaacatccgcttcttctggcgtattgacgatttggaagcctaatttttcaaggaccaaactagtatgagcaggagcatctactccagcccaattatagtggtagtttggagagtagaccttcatcggtttcaaggttgggccgcttggcaccttgtagagggcatcaccataaatggcatagtttggtaggagcgaagcaaaggtatcgcggtcaacgatgtagccatcatctgttaggtagacagattttccttgcgcaatggcctggttaaccgctttaacggcactggctgaggtatttgcgatcacatagtaaggagcttttggatcgatctcagaggtacgagtggcgcgggtggtggtgacttcgcctaattttccgttgaaaagaccatccgcaaagacaggttcggacttgaaccctctcatatctgggaagttgaccagcagctctgcgtacatagcagcccaggcagattcgttggagcccttgtagagaatgtggttggcatagccacgtttggcttgggccatgtcaatgactaagtccccttttttatagttgccaatatcttctttgagttccttgacgaggacaccattgcgtttgaagtagtcgatcatattgaaggcttcttgggcatcgttgtctttgtcgaggctcattgggatgacgtagtagtctgggaagaatttcggacgaccatttttcacacgtccaacgatttccccatttggaccgaccagttcattttcagcttttggatcttcggttttattgagaccgcgcaggtagaagttgagacgcatctcaaggagacggtccggatcttggttgaggaagtcaattccgcctaggacagcattgcgacctgctttgtaggattcttcatttccttccggaatttcgatggtatggcctaagataccatggtagacagcataaacccctgtatagccagagaaggagtcatcccagccatcgccccaatccagttttggaatgatgtaactattgtatttagaattggcaactcctgcccgtcccatatgatgggcattttctagcatcaggtctgacagaagatcgtattcgaagttcggatcatgtggtggcgttgcaggttcgatcaagaattctttgataaaaccgtgtaagtcgtagagagcgatcggattccatttgttgatcatttggataaccgtgcgaacttcagggttggtttggtagctggcatcccggtttggatcgagcccgtttgctagggcccgcaggttgagagcatccccatctgggttttccgtgaagtcaaataagaagatgaatttattgagcaaggttggaatatctagcgtgactgttttagcatttccagcttcatcagtggtgttaaaggtcaccttttccttggtcgcaaaagtattgaagaggcctgtgatgatatcaatgcctggttgttcatccgcgtgggtgttgtggactaagacaggtaatttgtaatccaaggttttgtcttttagtgcggccagcatttcgcttggcttagtcaaagctgtagggttggtactagacaggtagtgattgatgctggcttggtccttgctcacgatccccatcttcatatcccgtccttgggcactcttgccaagggtttccagctgcactaaacgatcgggtttcgcttcttccttggatttttcgatggcagccagcatttcttcatgtgtatggtagtcctgataaggtcgaaaaacaagggtcttattgatggtgatccctaagtctgcattggttccgaccagctcatgattgccgatgtagttgcggtaagtccggcgaatattatttgggctacgaagactgagatcttcaccaaagagatcctgcacgtcaatgtggagatctaaatcatttccgtttgcggtctctgtgatggtaaggaatggatccttgctcagtgttcctgtctccatatcccaggttttccactcagagagaggtttattgtctaaggtccagctgatcttgccagcagcttgagctttttcttggactttgtcatcaatcgtactcttttcagagagataaatggtgctatctgccaatcgtgtcgcttggtcagcggtcgttgtagcacggttagtgcttggactagcggttggcgcaacttctgtagtagaagtcacatcagaagtcgctgcggtttctgcaggactagcaggagttacttctgtggctgtagccgaactggtcgtctcggctgtcacaggttgctcagaagtaggtgtcgcttcaaggactgtgctcggttctgtttgaggcctttctaagctatcggctgaagcttggccatgactgatgacggaaagcaagacagccgctgagagactgagtgttgtagtgtacaaatgtttcttatacgaagacttcatatagaagaccctccttaaaaatgttattacagttccagtatatcattaaaagaaaacgtttacaatacatgtgcaaaaaagagggtggacaaaaatccagcctcttgaaatgacatttgaaaaacagatgatagggtagttgcttcctcgaacagtctcccctatttattcgttaactttatgaaattgttggtaaaaatcaaccttgatctggatgaaattttctaagtctcttaaaagttggagtaaggtagcgcgtgtttcaaattcctcacgagtcttaggaagagggcgttcgcggaagatcgccaaatactgagtaatatcatctagaagatcttgggcaggattttcctgacttaactgttgagccgtcttcttaaaaagttgagcaaggatcatactttcactcgccgccaactgacagcggttgacgttttctgccatatctcgcaggatatcgttttgtcgcttgcgcatttcgaagtagtgaatatggtagttggtttggtgaaagaggtggttggaatggtctagataaactagatttaaagcgtcctttaggataccatccaactccttaatcaagcgagcatcattgcgaccatcccctttaccaagaaattccgcaaaacgaccaaggatctttttcagttggtcttcaacaacatcatggtaatgatcgatcgcctcctgattcgaaggcatatagagattggccagcaaggcaaagctggttccaattaaaaagagagcaagttcattgagcaagagtccccaggaagtagactgctcaatcaagagatgggtgaccagcaccgtactaggcgtgatgccgatctgccagcccaatagaaaggcacaaggaacatagagagcgataaagacacccaatgcccagaggttgaaccctaaaaaggaaaaggcgagacttccgatagcaagggccagcaaggttgacataaagcgctggtaggcctgcttgatggtgctgcgacgtgtatccgagatactcaagatggcaatgacgccagctgagatggcataggtcaagcccagagcataagcaagggctgctgctaaacaggtggccaaggtgagcttgatggttcgttgaaaaagaggcatggcttcctttctagttcggttcgttcattgagatagatttgatttcattatatcatgaattggcctcttcctcctttcttgtggtatactagttctatggaaaataacgatatcgtatacggtgtccacgcagtcaccgaggctttacaagccaatacaggcaataaattatatattcaagaagacctccgaggaaaaaatgtcgacaagatcaaggccttagcagctgagaaaaaagtgtcgatttcttggacaccaaagaaaactctgcaggaaatgacagaaggagctgttcaccaaggcttcgttctccgtgtggcagcctttgcttacacagacttggcagcgattctgaaacagacagcccaagaagagaacccacttttgttgattctcgatggcttaacagatccgcacaatcttggctccatcttacggacagctgatgcgaccaatgtctcaggggtcatcattcctaagcaccgggcagttggggtaaccccagtggtgtcaaaaacttctactggagcagtggaacacattcccattgcgcgtgtgaccaatcttagccaaaccttggacaagctaaaggaagagggcttctggatctttgggaccgacatgaacggtacgccatcgcaccagtggaatacggctggcaagttagccttgatcattggcaatgaaggaaaagggatctcagccaacatcaaaaagcaagtcgatgagatgattaccattcccatgaatggccatgtgcaaagtctcaatgccagtgtggcagcagccatccttatgtatgaggtctttcgtaatcgactataattctagaaaggcaatgatatgaaacgaaaaatcttattggttgacggctataatatgattgccttttggcaggagacccgccagctctttcaaaaaagtgagctcgatgcagcccgcaacatcctcctgcaaaagctgagccactatgctagctttgaagggatcgaagtcatctgtgtctttgatgcccagtatatgccaggagtgcggcagacctatgaggagttcaatgttcaggtggtctttaccggtgaggatgagacggcagatgactatatcgagcgtttggcggcagagcttaatacgcccctccaccaagtatcagtagcgaccagtgacttaaatgagcagtggaccgtctttgctcaaggagcccttcgggtatctgccagagagttagaaaaacgggtcgcagttgtcaaaggaaaccttaatcaagcgcagcgagtggtcaacgatcaaaaaccacccatgcgaccactcgatcacgaagtattgcgacaattacaagaaatgatgggagacaagtaatgacatttgctattttaaccgattcgaccgcagatttagaccagaactgggccaaggaacaccaggtgaccattcttggcttgaccattgagttagatgggacggtttaccagacagttggccaaggtcaattgactagcactgaacttttagaagccatgaaaaatggggccaaaccgacaaccagtcaggtcaatgtgggccaatttcaggaaacctttgaacaatttgctaaagaagggaaagatttgctttatgtagccttttcatcggtcttatctgggacttatcagagtgcaatcatgacacgagacctggttttagaagactacccggaagccgtgatcgagattgtcgatccgaaggctgctgggattggagagggatatctggtcatgcgggcagtagctgcgcgtgatgcgggccgttcattagcagaaaccaaagaagagatcatggacctagcgccaaaactgcgaacttatttcctcgtcgatgacctctaccacctcatgcgtggaggtcgtctctcaaaaagtgccgcgatcatgggaagtttggccagcatcaaacccattctctggatagatgcggaagggaaattagtccctatcagcaaggttcggggacgcaaaaaagctgtccgagaattactggagttgatcaaagccgatatcggtggaagcacagccttggtgtcttataccaacgatctagaaggagcagaagcactgaagcaagaaatgcttgcacttgaaggcattgatgaagtcctcgtgatgcctcttggaccagttatttcagcccacgttggcccgaattccttgatcggatttgtcattggaaaagaaaatcgtaaataattttccaaatcggttgacttttatcttagaattttgatacaatagtaggcggtattgtttaccccatttgtaaggccccggaacctttcaaataacttgcggaccggaacatccgccctgtaaacaaaaacgacattcatataggagaaatcatgaacaaaactacattcatggctaaaccaggccaagtagaacgcaaatggtacgttgttgacgcaactgatgtacctcttggacgcctttcagcagttgttgctagcgtgcttcgcggaaaaaacaaaccaacattcacacctcacactgatacaggtgacttcgtaatcgttatcaatgctgaaaaagttaaattgactggtaaaaaagcaactgataagatctactacactcactcaaaccacccaggtggattgaaatcaatctctgctggtgaacttcgttctaaaaatgcagttcgtttgatcgagaaatcagttaaaggtatgcttccacacaatactcttggccgcgctcaaggtatgaaattgaaagtattcgttggagctgagcacactcacgctgcacaacaaccagaagttcttgatatttcaggacttatctaaggaaaggaacaataaagtatgtcacaagcacaatatgcaggtactggacgtcgtaaaaacgctgttgcacgcgttcgccttgttccaggaactggtaaaatcactgttaacaaaaaagatgttgaagagtacatcccacacgctgaccttcgtcttgtaatcaaccaaccattcgcagttacttcaactgcaggttcatacgacgttttcgttaacgttgtaggtggtggatacgctggtcaagcaggagcaatccgtcacggtatcgctcgtgcccttcttcaagtagatccagacttccgcgattcattgaaacgcgcaggacttcttacacgtgactcacgtaaagttgaacgtaagaaaccaggcttgaaaaaagctcgtaaagcatcacaatttagtaaacgttaaaacttatttaaacttattgaaagcatttcgtatcaaaaatacgggatgctttttctgttcaccccaaatttttgtaactaggtgatacttgaaattaatacaaatttggttgtttttgataaatctaagcaacactacatgatgaagtgaaaggggatgaatctttgatagtattcacttattgtgaaatatgatatatttattaattagatggatgaatacttctagagttaaatatagtataatagggacatactttttggtttatttttgtttgtagtcggattatgaaagaatatccaatattatgcgataagatagaatgttacaaaaaagaaaggggatgcaatccgatgaagaaagacagattaattgtattgacagatgctgttctagcaattattatgaccatcttggttttagagttagaaaaaccaacaacaccaagtcttgaagctttttgggatttacggcaaaatttctttgcttgttttctttcctttttctggttgggatcgttatggatggcactaaacacattatgggaaaaggttgagaaaatttcctcagaaattatttggtggaatttgtttctactcttggagcggcaggagttctctttggagaatttcatgccatccaagataccagtctgaatgatgtggtggaccggatctatataaatgtcaaggatttaccgtttcagtccttgggagctttagctaatatcctgtctgatattaagaagggactgattcaagacagtcatatctggtctttcttccagtcatttttcaaacaatatcagttgataatcagcttaaatcagatctatcagtttgtctatctttctctgatggagatcatgtcctatcttcactttgattattggaaaaaaacggctcggtcaggagctagtatgaataaggagaacaaatgaaacgtttaaaaatgttatggcatattatgcaggttacgggttttactcggtttgctctgagttttgtgacctttgtttttgggtcaggaggcgtgcttttcctagttgaacctgctatcacaaattacggagacggtctttggtatgcttttgtgacttcgacgactgtcggctacggggatctcctagctgtgaccttgattggaaggattaccagtgtcttcttgacgatttatgggctcatattttttggctgtttatcagctgttatttttaattattataccaatttaaataaggaaagaggagaggacaaatgactgccaattattcaacacgggaataccgtgagaaattatacgatgaccttcatgttcgattgagagatacagcgattttgatgtgttcgatttttattgcctctataggtctaaatatgaattcaatagctgtcattattggagccatgctgatttcccctcttatgacaccgattattggactggggtttggtttagctatttttgatacgcgtttaatcaagcaatctctaggggttttatttactcaagtattggtcagtttgcttgtctcgactctatatttctggatttctcccttatcttatgcaagtagcgaattgattgcacgaacctctccaaccatttgggatgttctcattgctattgcgggtgggattgctggtgtgatcggttcaaggaaaaaagaagcaaacaatatcgtgccaggagtagccattgcaacagctctgatgccacctatctgcactgcaggctatggtttagctaatggaaatgtacgatttttatttggggctctctatcttttcttgatcaactgtgtcttcatcatgctaatcaatattgttggaacaagaattatgatgagacaatctcccttaagttcatttaaagagctaaacattaaaatgaaaattggcttgatatccttgattgtattattggttcttccagccagctattcagcagtcactctgacgatggatcaagcacgaaaagaagggattaaacagtttgtaggcaaagagttctctaatcatacgatcattaatcaagtctacaagtcaagtagcaatgaattagtcttgacagttgttggagatccgatttcagaagaagaattagaaacaattcgccaaaagcaagcctcttacggtattcaatctgttcaattgaaagtcaatcaagtccataattcgacaaaattagatagtgagatgaccaaggaattttatgaaaccattaacaagtatatcgatcaaaaactctctgaaaaagattcacaaaacgatctcgtaaaagaaaatgaagcagacaaggattgaggacaatgaactgaatcggtttttacgccgtgtttttcttgtatcttcctctttcttacttatagcaggttgtttttgcttgaataagaaataaattagaagttctatcatctaagaaaaatgatgaaaaaaatcatttaactaatggtgtgaacgtttagtgtttatcagctccattctctgtaattttgggggtaaaatccacaccatttagataaaattagttgaatttgattggaaaaacgcttttataaaagcggagaaaagtcttgatattacgctgtttttagtccaactgaaattcatactttccaaaccaggtcttaagaaagctcgtaaagcatcacaattctcaaaacgttaatcaatacgattatatcaacgtttacagacattcaagaattatttcttggatgtcttttttgtttcaaaaaatcaaagttcaccccaaaattcaccccatattcaccccatcaattttttaaactacgaaaagcaatatcacctacagtctgattgactttatctttgatattaacgtaagtttttgtaatctctttatcactatgagtaagagcttctgagaaggcttcaagagaaacacctgcttgtttagcaagagtagcaccagtatgtcttagtttgtgtggtgatgctggtgctaattcgggatgtcttcgtctgactgatttcatcttgataaaacttaaaatttttctaattataacgaagcatagtcaaaaagctatgacctctatattcacaaaaaaatccagaccaatactagtccagatttcttgtctattaaacattcttttcaaagaatggaagaacggctgtaacggctttgtcaacgcaattatttaactgtgagaatccgacgcacataaattttaaatggcgtctcagtcacatttaaatttatgagacgcttagacgttaggctttcaatttgtcaaattttgctttgacatttgccttgaattcttcaagtttagccttgcgttcggctttacgttcagccttcatttgtgcacgtgcctggttgtagaggtcttcttggacttgcagagctgcttcgatttcggctacgacggttgctacatcccaacgcacgatttgggtgtcgtacttggtgaagtaagcatcgatgactgcttcgttgttttcttgcaccaaggcgacaacggctgtttcgccgtcgatcaatttttgagacacaacgtcaatcaagccagcttctgccgtatcaacggtatcaccagcagccaaaccatagaggctgccaataccataaccaaacaagacgccgataggaccacccaaaagcccgataactgcaccgagcaagccaccttctagggttgcatccgtcgttgaatcttcaaagtcatagcgttctttttcaacgatgtgaccgttttcatttttgaccaaggcgatttgagcaaccttggtcgtctgagtttggcggaaagccttcaaatccgcaaaggactgataagcttcgctttcagtgttaaagactgaaactactaggttttccatagttagtacctcttttctaaatatatacgttcattataatacagtttcaatcacttttcaatcattttagtgcgacattttaattgatatgtcgcgtttatcagcgtcaaagaacagtttcaggcagcggtatatctttgccatatcccagcccagatactctggcgactctgagtgattatcaagaaaggcgtccagcaacatcttaaagcctcccgtgcaaaaagtaaataaatagtgtttttcctgtatgcctgtcacacggctaaaagaccgcttgaccaaatcttccagaaaattatagcagatattatgtaccagctctgtgtagcgagtctgatgagcgtgccgaatcacatcgacacttttatagaatctgccaactgtttccttatggtcgaatccttgaaagaagtcgctttattcgtcggtcaagacaattaatttggctggtgcaactgattcgccaagctatgaacaagcaattattaccttttgaaagcaaaaatggcaattatgaaggtgaagctactcaggtcttagttcttctatccaattactatgcagacaaaaaactatttgatgaaaatacagatgaatatggaaatatcttgattttaaaggattcatccatcatttctaaattatcggctatcccagatttattaaaaaggggatctagtaggtaacaataatatcgaatatatcaaagtacgcaatattaggatttcttcagaggttgagttagagtcagatgttgatggggataagtcggataatctgccaatagatataaaaatactagaaaacaggcttgaaaaaggctcgtaaagctagccagttctctaaacgttaattcgttgctggacagcagaatacaaacgaaaacactttgcatcttgcaaggtgtttttttctatgagaactggcggtgcgcaattaggatagctctagcgactttagtcgcatagagatatgctatgcacagttgcctcaagaaaacaatgcttcttggtccaccctgttagacaagcttcaaaaccaaggaatccaacagatttctcttgtagttacagatggctttaaggggcttgagcagattatcagtcaggctcacccattagctaaacaacaatgttgcttaattcatattagtcgaaatctagctagtaaagtgaaacgagcagatagagcggttattctggggcaatttataatgatttatcgtgctgaaaatttagaaatggcaggacaagctttagaggactttctcgccgaatggaaaccaaagtataggaaagtcatggaaagtctggagaagacggataatcttttaactttttatcagtttccctaccagatttggcacagcatgtattcgacaaacctcattgagtctcttaacaaagaaatcaaacatcaaacgaaaaagaaggttctttttcctaatgaggaggctctggaacgttacttagttacgttgtttgaagattataatttcaagcaaagtcaacgaatccataaagggtttggtcaatgttctgatacacttgaaagcttatttaattaacactccgtaactctacttaagtgtttacacataattatttacagtatcaaaaaataaagtatattgttttcatcataatataattaaatatcagtatagagaattttatctatatatcagatatcagcaattgcttttgctgtcatttttcgctacaatagttacaaggaggaaataaacatgttaaaagaagtattaaacgtcgcaaaagttgcgaaaaaatcatctctcttcttaggaggggtagcatttgggacgcttggcttgaaagtcttagcaagtaaagaagctaagaaaggctattctaaggccttggctaaagcttacaaattgaaagatggactggatgcatctgtttctgttgtaaaacaacacggtgatgatgttttacaagacgctaaatatttatacgaacaggaaaagaaagaagaacaattagatagcctgacaggtgaataatatgtcttttaaagtgctacacagaggatatcaacatatccgattatcgtcctcgttttcactgaccttggatattcaagattatcttcgttccttggctaaagatgaaaaagggatcgactctattcagttttatatggatcagcagcactttactctacgtatgaaagaaggcttctctgtattagaaaatgcagaggcctttttaaaaaaaattgacaaggggaaagtttcggacttgatgactcttcccattcgtagagaagagagtgcttattcaattgtatcgggtgcagcgattaagcgtttgctgtttcgaagttttgtaccctaccctattcgttatatttggacttgttatcaggctttgggttatgtcaaagaagcctatcaaactttagcgcgcaaggaactaaccatggaggtcttggactgttcggccattttgttgtccttgtttatgaaccaatccaagacagctagcaacatcatgtttatgcttgatttgggtaatcatctggatcagtggtctttaaaaaaaacagcaacagatttggaacaaagccttcttgctaaagaaagtgatgttttcttagtgcggggagacatggtcatcagcatcaagagttctgatgttcaagtaggtgatgtattagttgtctcccaaggtaatgaaatcttgtttgacggccaagtggtttcaggattaggcatggtcaatgagagttccttgactggagagagcttccctgttgaaaagaaagagggagattctgtatgtgcgaatactgttttggaaacaggagagttaagaattcgtgtgactgataatcagataaacagtcgtattttgcaactcatcaatctgatgaaaaaatctgaagagagtaagaagacaaaacaacgtcattttattaggatggcagacaaggttgtaaaatataacttcttaggtgctggtttgacttatctgttaacaggttcgttttcaaaagccatttcctttttattggtggatttttcatgtgctctaaaaatatccacacctgtagcctaccttacggccataaaggaaggtctaaatcgagaaatggttattaaagatggtgatgtattagaaaaatatctggaagtggatactttcttgtttgataaaacgggtaccatcacgacgagttatcctttggttgaaaaggttcttcctttcggagattatactgagaaagatattttaagaataagtgcatgtttggaggaacatatctatcatcctattgccaatgcaattgttaaacaagctgaaattgaaggcattgaacacgaagaaatgcatggcaagcttcagtatgttgcaagcaaagggattaaatcgcaaattgatggtcaatcggttgtcattggaaattatgtactaatgcaagacgaacaggtaagaattagttctgagcagctggccttgattgagcaatataagactcattacaatttattgtttttggcttataagaaagaattaattgggatgttttgtatccacactcccttgagaagcgaggcgaaagttgcattgaaaaagctaaagcgccaagggaaaaaactgattctggcaactggtgatacgttggctagaacagaagagttggttaaagatctgccatttgacaacgtttatactgatttaaaaccagatggtaagtttcagttggttcaggaattacagaaagctggccgaactattttgatggttggagacgggttaaacgactctgctgccttgacgcttgcagatattggggttgtgatgaatgaaagtgctgatatttctaagcagatgagtgatattttattattagataatcgtttagatttcttcgaggaattgaattctttatctgaatcgttgcagaaattaattcaaagaaatattcaagaaacagttgtaataaatggaagtttaattggatttgggttgttaaattggttaagcccatctaatctttcgatattgcacaatctgactactttaagaatcgtccttcgtagtctttctattaaaagtaggtaagagaccgagaagctgaggttataaaaactaaaaggagttgtctcatttgagaataacggctctttgtcaactgtagtgggttggtggaaaattataccctggagaggaccaaattggttctctccttttaaatattgaaaaaaccattggcagtggacatactttaagactatatatttctgaaactagtttcacaatacaaatattgacatgcaattattaattggtggattttaagttgacatctacaaagtttaatgttaaaatacattcaaaaatatatttgaatgaggtgctttatggttcaaaatgttgttacttcaataatcctgtattctgggacagccgtagacttacttattatcctaatgttattttttgccaaaagaaaaagcagaaaggacatcattaacatctatttaggacaatttctaggctctgttagtctaatattcctaagtttgctttttgcatttgtcttaaattatattcctagtaaagagattttaggtttactcggtttgattccaattttcctaggcctcaaagttttgcttttaggagattctgatggagaagctattgcaaaagatggtttgcgaaaagacaataaaaacctgatttttctagtcgctatgattacttttgcaagttgtggcgctgacaatattggtgtctttgtcccatattttaccaccttaaatttagcgaatttgatagtgactttacttacttttctagtcatgatttatctcttggttttttctgcccaaaaattagcacaagtcccttctgttggagaaactttggaaaaatatagcagatggtttattgccgttgtctatttaggattggggatgtatatcctgattgaaaacaacagctttgacatgctatgggctgtgttaggctaggagaaaaaattatgaaaaaagatagtatctgtcaagtggatgttataaatcaacaaaatgttacaaccgcaacgaactaccttgaaaaggaaaaagtccaaaaatcacttcgcattttatcaaaatttaccgataataaacagataaatatcatcttttatctccttgccgtcgaagaactctgtgtctgcgatatagcctgtttattaaatctcagtatggcatctgcctcccaccatcttcgtaaactagccaatcaaaacatcttggacactagaagagaggggaaaattatatattattttataaaagatgaggaaatcagagatttttttaatcaactaggataacaactatttttactacttttccatgattatagggagattatatatgaaattttttgatgaaaattactcacaagaaatacctactcgtattaaatgtttaagaaaaaagtataatttaaagcaaagcgacctaggtaatgcaggtcaagttaggcaaattgaaaagggagaaatttgaaagaatttgtatcttttattttttgtttcatttatgccctatgctactggaatagttagtagtcatttcatgaatcatacggcacagctcttttatggactgatcgttattgtttcaacggtagcaaactgttttttacataaagtaattgataaacccaatatagatcagaaagaattacttgaagctaccgcacaatataggaagttattgatacctgacctaataattaaaggagtgggattgattctatccttaattgtctatcctctgattatgatgtatagtgttttaattgcggcattttacatcataactttaaaaacactatccgaaaaaagagtgaataactaaaaaacggtgaccaaagttaggtgtattattttaatgcttagagacctaaactatttccccgtttaaaaaatattgattcaaattttatgaaatcaattagtagatatcgttctgaaaagccctgatattacgctatttttagtccatctgaaatccatactttccaaaccaggtcttaagaaagctcgtaaagcttcacaatttagtaaacgttaattcgttactggacagcagaatacaaacgaaaacactttgcatcttgcaaggtgttttttgtatgagaactggcggtgcgcaattaggatagctctagcgactttagtcgcatagagatatgctatgcacagttgccccaagaaaacaagcgaagcgatatttgaatggatggcaaccactgcacgcaaaatgttaattcgaaagaattactatacttacaaagagcacccttcggggtgttctttttgtataactgaatttgaagcaaataaaacccaccctatctttcacagtcaaatgtgactgtagaaaatagagtgggtctaggatgttaaagactatttgtcttctttatgaaagatatttttaacgcccttgatagctccttcgacagcttcttttgcatcttcagcaacttctttagcttttgaagcaactttttcagcagtgccttcagcttctgtttttgtatcaccggttaatttaccgaagccttctttaacagaaccttttacttggttcaatttttcttctaatgacatagcgtcacctccatgaagttagtagttttttctctgaatgcaatactgttgatttaaaaaaataaaaaatatttgtctcagattagaatgagtatattctttttaaaatggaaagtcaaatttttgctacggtattctgaaagcaggatcgacgtttgatctgatggcaaatagcgagcgactaataagtcacgatatttcgtttttccagcaaagatttgaaacgaaagaagcaaaaacttttctgtctccaatgaaataaatggtataatggtcgtgaatggagacgtcgtaacgctgttttttgaaaaagagaagataaatatgaaaagaatccttacaacctaccctgttatcagtactttagctctaatctgtttgctgctcggtctattgacttccttttatggggatgctatgtatgacctattggcttttcattcgaagccggtctatggttggcaatatattagtgggaccctgatgcacggtagtaaaggagcccctatctggtttttatgggttcatttgttgttaaatggactcatgatccttcccttcggaggactgctagaaagaaaaagaggctccagacaagtcttgatcgtttttgtgacggcgacagtcttctcttccatcgtttttcaccttttaacccaggagcaagacattcaggcaacagggatctctgctgtaggatacgcctttgtaaccggtggagtcatgctcctgccaaacgtgtggaaagagttctcacgtaccgtaaaatggctttatctattcttaatttttctatctggcctcatgctcttaccagcaattaccggatggatctcaacgctattgcatctttcgggaattgtgagttatctattggtctttattggaagtaaagacttgaagggaaggagctaactattaagacagctcctcagtatggttttcatcgtacttccttgactcttcctctaccaggccgtataatattctatatcaatgaagaaatcaccttttgtcattgtgcaaagggtgattttataacgaaaaaaaggagacacaatggggtatatctctactattaaaacggctgttcagctctttcctttcctggcatttttgctgaccttgccctacatgattttgaattatcgaaaatatggttcggtcaataaattgcgggtgctgattttctattcttttatgctttacttgatgacggtctatttcttggtgatcttgcctctgccagatccaagtaagattcatactagctactcggaaatggtcaatctccatccctttgcttttgtggtggattttttcaaggagagcccctttgatctagcgcagactggtacttggattcaagcccttaagcatccaactttttatgtgcctgcctttaatgtcctgatgttgattccttttgggatgtatctgcgctattatttcaagtgtggttttaagaaaacgatccttctgacagccttctttagtctctttttggagctgacccagttgtcaggtctctactttctgtatccgggtccttaccgcctagcagatgtcgatgacattattcaaaataccactggtggtggagtgggctatctgctcggttggttcctggtttggttattgccgacacgagacgaaattgacgagcaatctttccgagtaggaaccagagtatctggtttccggatgggtcttgccttcttgatcgactttgtgatgctatccttgctttacgcggtaatcgagcgtttagagacgattccttatgtagcggttttggctgtctattttgccttgattcctttgtggcgtggcaaaaccttgggaatggctttattgaaattccgcttgaattttgacaagcaaaaatggcttcgcaccatctggcggggaatcctggtagtaggttatttctatctgattcctcaagggttgttctatttgatttcgctcttgaatagcgatttgacggacaattctctcttaaccctgtccatgattttattgctcttctttgtggttttattgtacctgattctcactcttgccatcatcttgctcaatcgtcgctttccctttgaccgtctagctggagctgagtatgagagtacggtgcgcgtgaagaaatagatcctaaaggatgaaactgaatcgtcaaaatagagagagtgggacagaaatcggtaattcgttagaattcgatttcgtcgtctcacctccgcacagttgagtagggctgtaaaagctgatgaaatcagcgtagtagagcccacgcaaccactgcgtcttgctcgacaatccaaaaacaattgagaggctaggacttttgtcctagcctctttatttttttatacacgtttaatatatccgaacgttcccagttgagaagggcgattttaaggggattgtgctacaatggaagcaaatagatagaatggagcagtgaaatgaaagcaattattacagtcgttggaaaagaccaaaaaggaatcgtagcgggtgttgcaacgaaagtggcagaattaggactcaatatcgatgatatctctcaaaccgtattggatgaatactttaccatgatggcggttgtatcgtcagatgagaaaaaagatttcacacagctccgttcagagttggaagaattcggtcagtctcttcatgtaaaaatcaatatccagagtgcagcaatttttgatgccatgcacaatttgtaagataggggttgagaatttatggacattaaacaggtaacagaaaccattgccatgattgaggagcagaacttcgatgttcggactatcaccatggggatttcgcttctagattgtattgatccggatatcgaaaaggcagcagaaaaagtctacaataagattgtgacaaaggccaaagatttggtagctgtgggggatgagattgcggcagaacttggcattcccattgtgaataagcgggtttcggtcactccgatttctattatcggagctgcaacagatgcgacagattatgtaccctttgccaaggcactagatcgtgcggccaaagaagttggggtcaactttatcggtggcttctcagcccttgttcaaaaaggctaccaaaaaggggatgaaatcctcattaattcgattcctcgtgcccttgcggagacagattttgtctgctcttcagtcaatatcggatcgaccaagacagggatcaatatgacagctgtccgagatatgggtcgtatcattaaagaagcttcccaagcagatccaatggggcctggtaagctcgtagtttttgccaatgcagtagaagataatccctttatggcgggtgccttccacggtgtcggtgaagcggatgttgtcatcaacgttggggtttcaggacctggtgtcgtccaacgggccattgaaaaagttccaggagctagctttgatgtattggctgaaacagtcaagaagacagccttcaaaattacccgtgttgggcaattagtggggcaaatggctagtgaacgtctcggtgttgagtttgggattgtagacttgtctctcgcaccaacgccagctgttggggattcggttgctcgtgtccttgaagccatggggcttgaagtagtaggaacccacgggacaacagcagcactagctttgctcaatgaccaagtgaaaaaaggcgggatcatggcttgtaaccaagtcggtggtttgtcaggtgccttcattccggtctcagaagatgaagggatgattgcggcggtccaatcaggccatatcaatctggaaaaattggaagccatgacagctatctgctccgtcggtctagatatgattgccatcccggctgatactccagctacaaccattgcggccatgattgcggatgaagcagctatcggagtgatcaaccaaaagaccacagccgttcggatcattccttatggaaaagaaggcgatatgttagagctcggagggcttcttgggtctgctccggtaatgaaggtcaacaaggcttcgtcagccgatttcattgcccgtggtggccaaattccagctccggttcatagctttaaaaactaagagaaatctagtataatagtagaaaatagaaaagtctgtgatgatgaaactccagacttttttcttgcaaaaggagacaagatggctaaaacaagattatttgtgatacgtcatgggagaaccatgtttaatactattggccgtgctcaaggttggtccgatacgcccttgacagcagaaggagaacgagggattcaggctctgggaatcggcttgcgtgagtctggtttggagtttactagagcttattccagtgattcaggccgtgccattcagactatggggatcattctcgatgaattgggattgaaagaccagattccttatcgctttgacaaacggatccgcgagtggtgttttggtagctttgatggggcatacggtggggagctctttcacggtgtcgtgccgcgcgtgctggatgtagaagactataagaccttgaccttggaaaacttggccaatggcatctgccaagtggacacagcaaattgggctgaaccttgggaagttttgaaaagccgaatcctagaaggttttgaagccatcgccaaagaagtagaagaaaatggtggaggcaatgccttggtggtcagccatagttggaccattcagacctttgtctgcttgatcgaaggaaaaccaaatctcaatctgcctctttcaaacggtagtgttacccttgtagaatatgaagatggaaaattgacggttaaggggtttggagatagcagttaccgtgaggtcggtgaaagcttgcaagaatcctagttcgtcctgaaaggctgatcttttggtcatgccttttctttttcacaaaacttgtaagagctttcctactttctttttgcaaaaaatgatataatgaaagagatacatacggaggtaatacaatgacaaaaaccagattatatattgctcgtcatggaaaaaccatgtttaataccattgggcgagcacagggctggtcagacactccgctgacagaagcaggagaacgtggaattcgagaattaggacttggtctcaaggaagctgggctttcttttgaagaggctgtttcgagtgattctggacgcaccattcaaactatgggaattattcttcaagaacttggtctgacaggaaaaatcccttatcgttatgacaaacggatccgtgaatggtgttttggtagttttgacggtgcttatgatggcgatctcttcatgggggttttaccccgtgtctttaaggtcgatgatttccatcagttgagcctaatggagttagcagaaggaatcgtcgaagtggataccactggatgggctgaatcctggagtgccttgagtggccggatcctagaaggatttgaagctatcgcaaaagaagtagaagcagctggcggtggcaatgctattgtggttagccatggtatgacgattacgaccttgatttatctcatcgatcctaaggttgtcgaagaattagtcttggacaacggaagcgtgacggttttggcctatgaagatggtgcctttcatattgaaaagattggggatatgtcctatcgtaaggttggagcaaaacttctagagggtggccatgacgaataagtatagacgcgcacgaaaaaaacgtaagaagtggtggccttacctattgagtttctttcttcttgtggtccttggatcgggaattggtgcttacttagcgaagccgagcttgttttcagggcttcagttttggaaggctaaaaaaacagctgtaacgactccctcttcttctaagaaaaagaaagaaaaatcagatttaccagccgtttcgacaaaagactggcagttgattttggtcaatcgtgacaatgtgaagcctgagctgaacccacaattgacagatgtggatgctatcaaagtggatagtcggattgtagaaccgactcgtcaatttttagaagcggctcgaaaaattgccccagaagaaaccttgatatcaggctatcgaagtgtggccgagcaaacagagctctataatgagcgtgttgcgcaactagaggctagtggtctttcgcacgaagaagctgaaaagcaggtgcagacccaggtacaggtccctggtgcgagtgaacaccagacagggcttgcgattgatatgagtgtcgaagctggccaaagtgatgagttgggcatgcagctggctgccatcgcaccgcaatatggctttgtccttcgctacccagatgggaagagcaacatcacgggtgtgaattttgagaattggcatttccgttatgttggcgtagaaaatgctcagtatatggccaagcatcagctagtattggaagaatatattcagctattgaaaaaagctggcaaataagaggagattcacttctctaggtcttaagaatgatttttagcactcttgaaaaaagagtgctaattttttggttttttctcttgactttcttttggatgggtgtataatagaatcatggtttagcacttgagcatttagagtgctaaaaatgaaagagaggtgaggtcatggttacagaacgtcaaaatgagattctcaatcttgttgtcgatatctttaccaagacccacgaaccagtcggttcaaaagcgctacaagatgtcattcaatccagtagtgcgaccattcgaaacgacatggctgccctcgaaaagcaaggcttactagaaaaagcccacacttcgagtggacggatgcctagccgagctggtttccaatattttgttcagaactcgcttgatctagagctgattgatgagcaagatgtctaccaggtggtgaaagcctttgatttcgaagcctttaagttagacgatatcttggatgctacggccaaattactagcccagatgacgggttacactgcagtgattcaggatgttgaaccgacacgtcagcgcttgactggttttgagattgttccattatccaatcacgatgccttggcggttctgaccttggatgaatcaaagcctgtcaccgtccagtttgctattccaaagaatttcttaaccagtgacttggaaatcttccatcagctggttcaagagcgcttcattggaaatactgtcttagatatccactaccgcttgcggacagagattccacagatagtacagcgctattttaagacgacagacaatgtcttggatctctttgattacgtcttctcgcaactgtttcaagaactggtctttgtagaaggaaaggtttcatccttaacttacgccgatcttcagacctatcagttcttagataacccccaacacgtagctctcgagttgcgagggggaatgccagaggaccaaatgacccagattctggttgctgaatcccaagagaaggctttgaaaaatgtgaccgtgattagtcataaattcctggttccttatcgtgggatggccctcatgcatgtgattggtcccgtagagatggattacaggcgtgtgattagcctcgtcaatgttatcggacgggtactggtcatgaagttaacggactactaccgttacctcaacagcaaccattatgaagtaaattaagaccaaatgaaaggggtgtatgccttgacagaagatatcaaaaaagaagacgtgaaagaagaggaagttgcccaagcaactgaagaagttgtagaggaaaccaagcaaccttctgaattagaagaagcacaagcgcgtgccgaggaatttgaaaacaaataccttcgtgctcatgcagaaatgcaaaacattcagcgccgtgccaatgaagaacgtcaacaattacaaaaataccgtagccaagatttggcaaaagcaatcttaccatcacttgacaacctcgaacgtgcccttgccgttgaaggcttgacagatgatgtgaagaagggcttggaaatggtccaagaaagtttggtacatgccttaaaagaagaagggattgaagaaattccagcagatggagcctttgaccataactaccacatggccatccaaaccttacctgcagatgacgagcatccagcagacaccatcgcacaagtcttccaaaaaggctacaaactccatgaccgcatcctacgcccagctatggtagtagtgttcaactaggcgagaaaacttaaaaaccttgtccgaaacgacactaaactatgaaagaaagataagaagcaagccggaggcttgcaaggaagatatttcccgccacttaagggaaaatatcaaaaagaaaaaaagaagataaatttaaggagaaaaacatatgtctaaaattatcggtattgacttaggtacaacaaactcagcagtagcagttcttgaaggaactgaatcaaaaatcatcgcaaacccagaaggaaaccgcacgactccatctgttgtgtcattcaaaaatggtgaaatcatcgttggtgatgctgcaaaacgtcaagcagtcacaaatccagatacagtcatctctatcaaatctaagatgggtacttctgagaaagtttctgctaacggcaaagaatacacaccacaagaaatctcagctatgatccttcaatacttgaaaggttacgctgaagattatcttggtgaaaaagtaaccaaagcagttatcacagttccagcttacttcaacgatgctcaacgtcaagcaactaaagacgctggtaaaatcgctggtcttgaagtagaacgtattgtcaacgaaccaactgcagcagcccttgcttatggtttggataagactgataaagaagaaaaaatcttggtattcgaccttggtggtggtacattcgacgtatctatcctcgaactcggtgatggtgtcttcgatgtattggcaactgcaggggataacaaactcggtggtgacgactttgaccaaaaaatcatcgactacttagtagcagaattcaagaaagaaaatggtatcgacttgtcaacagacaagatggctcttcaacgtttgaaagatgcagctgaaaaagcgaagaaagacctttctggtgtcacttcaactcaaatcagcttgccattcatcactgcaggagctgctggacctcttcacttggaaatgaccttgactcgtgcgaaattcgacgatttgactcgtgaccttgtagaacgtacgaaaactccagttcgtcaagccctttcagatgcaggtttgagcttgtcagaaatcgacgaagtcatccttgtcggtggttcaactcgtatccctgccgttgttgaagctgttaaagctgaaactggtaaagaaccaaacaaatcagtgaaccctgatgaagttgtggctatgggtgctgctatccaaggtggtgtgatcactggtgatgtgaaagacgttgtccttcttgacgtaacaccattgtcacttggtattgaaacaatgggtggagtcttcacaaaactcatcgaccgcaacactacaattccaacttctaaatcacaagtcttctcaactgcagcagacaaccaaccagctgttgatatccacgttcttcaaggtgaacgcccaatggcagcagataacaagacgcttggacgcttccaattgacagatatcccagctgcacctcgtggtatcccacaaatcgaagtaacattcgacatcgataagaacggtatcgtgtctgttaaagccaaagaccttggaactcaaaaagaacaaactattgtgatccaatctaactcaggtttgacagacgaagaaattgaccgcatgatgaaagatgcagaagcaaacgctgaagcagataagaaacgtaaagaagaagtagaccttcgtaacgaagtagaccaagctatctttgcgactgaaaagacaatcaaagaaactgaaggtaaaggcttcgatgcagaacgtgatgctgcacaagctgcccttgatgatcttaagaaagctcaagaagacaacaacttggacgaaatgaaagcaaaacttgaagcattgaacgaaaaagctcaagctcttgccgttaaactctacgaacaagctgcagcagcgcaacaagcccaagcaggagcagaaggcgcacaagcgacaggcaacgcaggcgatgatgtcgtagacggagagtttacggaaaaataagatgcaaagcccgttaaaacctcacagtgaaaataggaaatctgacgcagaaactctagtttctaggaagatttatctttttcaccaagaggttagggcgtgctcaattcagcttaacaactaaatgataaaaagaaatccagaggttgcaacccagcctctgtttttcggtaaaatagaggatgttgtctatgaaaaaagtactttgtatcatttatccaaatttttctctttatgagataactgctttaacgagtactttagttctgtcttttggcgtcacgattgattatgtcgcttcagatcattcgatggtggtctctgaggatggattgccttgtcaaccaacgaaaacactagatcaaatccgtatagaagagtattcttgtgtgattttgccaggaatggtcaatataggtcctgctctacagaatgagaaattgatttcgttcttgagggctcttggtgagcaagatatcctcattgcagccatttcttcagcgcctcttttattagcgaaagcaggtttgctgaacgatacgaaatttacaggtggaatttggcaaaacttctttgattattttgaatttcttccacgtgagaatttccaaccgaaagtggttgtgcaagataaacagatcattacggctatcggttttgcccatcaagagtttgcaagaaaagtgattctaagtttaggcttggcagagaatacggacaactattttaaagaacgaaacgactattcagaagaggatttgatatttactctatcggaccaagagtttgatcaagtgaagcgaagtatagaaaacagcctctaaagatttacatgaaaattatagaaaggaacaaagagtgttcgtaactgaacacgggctacggacggtgccaaaaagatagttttttctaggacgcaagcgtccgtcgtcaaaactcctattttggctgtgtccgtttaacgccctttgtatcttgaattatgaacaatactgaattttatgaccgtttgggcgtttcaaagaatgcatctcaagatgagatcaagaaagcctatcggaaattatctaaaaaatatcacccagatatcaacaaggagcctggtgctgaggacaagtacaaggaagttcaagaagcttatgagactttgagcgacgagcaaaaacgggctgcttatgaccaatatggtgctgcgggtgccaatggtggcttcggtggcggagcaggtggttttggtggctttgatggtgctggttttggtggctttgaagacatcttctctagtttctttggtggtggtgcgagtcgtaatccaaatgcacctcgtcaaggagatgacctccaataccgcgtcaatctcaagtttgaagaagcgatttttggtgcggaaaaagaagtcaagtaccatcgggaagctagctgtcatacctgtcatggttctggggctaagccagggactagtccggtgacctgtggacgctgtcatggttctggagtcatcaatgtggatacgcaaacccctcttgggatgatgcgccgtcaagtgacctgtgatgtctgtcatggtcgtggtcaagaaatcaaagatccatgtacgacttgtcgtggaacaggtcatgaaaaacaagctcatagcgtaaacgtcaagattcctgcaggagttgaaacgggtcaacaaatccgcttagctggtcaaggagaagctggttttaacggtgggccttatggtgacttgtatgtcgttgtcaatgttgagccgagcgatcgcttcgaacgagatggctcaaccatctactacaagttagacttgaactttgtccaagcagctcttggagatacggtccatgtgccaactgttcacggagatgtcgatttggtcattcctgaaggaacccaaaccggtaagaaattccgcctccgtggaaaaggtgctccaagcttgcgtggtggtgctatgggggatcaatatgtatctgtcaatgtcgtcaccccaactggtttaaatgacaagcaaaaagaagcccttcaagcctttgcggaagcaagtgatttgaaggtcaacccaaagaaaaaagggttctttgacaaggtcaaagatgctttagatgatttataagaatgaacgagtttccttttgagtaaggagctcgttttattttggatcgaatccaagaacttcctctcctaattaaagaataatgagaagcctcattgaatttattaagatatcgtggtaaatttaagaaaacgattacaatgacaatttaggaggtcctgatgaaatcagatcaaccacgttatgcgattcgcaagtatgcagtaggagctgcttcggtgctcataggattttttgctggcgcgaatgttgtagcagctgatacgccaacggctacagacagcccttcaacgacagttccaactcagccaaacgagggtgagtcgacgatttcccttaatgaggaagcttctcagccaacagtagaaaaaccaacggctcctgccccaatcgtcgatcaaagtcaaccgacactgcctgatcgtgaattgcgggtatcagatcttgaccgtttgattcgcgaagaagcaagttctgtcgcagagtcggatgtggcagctcaaccagcgacggaaacgcctgctaaagatcctgatcaggaagaaaaattagccaagaaaaagattgtttcgatcgatgccggtcgcaagtacttctcaccagagcaaatcaaggaaatcattgatgaagctagtaagacgggctatacagacttgcatcttctagttggaaatgacggcttgcgctttgtgctggatgatatgtctttgaaagtgggagatacttcttattctagccaagccgtgacggatgcggttgaaaaagggacaaaagcttattacgatgatccgaacgggacagccttgacccaggctcaaatggatgatattttagcctacgccaaatccaagaaagtaggtgtcatcccaaccattaatagtccaggtcacatggatgcgattctgacagccatggaacaattggggatcgaaaatcctcactttaattactttggcactaaaaaatcagctcggacagttgatttggacaaccaaaaagccttagactttaccaaagccttggtagacaaatatgcagcttatttcagtggcaagacagacattttcaatatcggtttggatgaatatgccaatgatgccacagatgcccatggttggcaggttctccaagctagcaagcattggccaggtgaaggctatccagaaaaaggctatgaaaaattcatccaatatgctaatgatctagcagctattgtgaaaaaacacaagatgaaaccaatggcttttaatgatgggatctactacaatggcgatacttcctatggcacttttgacaaggatatcattgtctcctactggacaggtggctggaacggctatgatgtcgcttcttcaaaactcttgtctgaactaggtcatcagattcttaatacaaatgatgcatggtattatgtgcttggacgggacaaggctggatctggttggtacaaccttgatcaaggtctcgaaggaatttccaagtcagcgattgatgtggttcaaaaaaatgatggggctaaggttcccttcatcggtggcatggtagctgcctgggcagatacgccatccgcaacctacaaaaaagaccttctctttaagctcatgcatgccttcgcggacaagaatgcggactactttgtagcagatcctgaagtcgtcgaaaaagctctttcagaagctccaactgatttggaccactatacaccggaatctctagtagcctttacggcagctaaaaaagcattagaaggggcaggagcagacacgactcgagcagaggccaaaaccttgatcgacaatctcaaagcagctcaagatgctttggtgtacacagaaagctacgcgaaagaagttgctgcaaaagaagcagcagaaaaacttgccatgaagaaggtcatctcgatcgatgcaggccgcaaatacttctcattggatcagctgaaacggatcgtcgataaggccagtgagctgggttattctgacttgcacctccttgtcggaaacgatggcatgcgcttcgtcctcgatgatatgacggtggaagccaatggcaaaacctatgctagtgacgatgtgaaaaaggccattctagaaggcaccaaggcctattacgatgatccaaatggtcaagccttgacccaagcagaaatggatgagctccatgcttatgctactgctaaaggaatcggcttgattgcggcagtcaatagtcctggccacatggatgctttgttggtggccatggaaaaattgggcattgaaaatccacaagccagctttgatactgtttcaaaaacaaccatggatttgaccaatgaagcagcagtcaactttaccaaagccttgattggcaagtatatggactacttcaaagacaagtctaagatctttaactacggaacagatgaatatgccaatgacgctaccagtgcgcaaggttggtactacctcaagtggtatgacctctatggtaagtttgcggagtattccaatagtcttgcagccatggcgcgtgaaaaaggcttgcagccaatggcctttaacgatggcttctattatggagatgaagatgatgttgcctttgacaaggacgtcttgatttcatactggtctaaaggatggtggggctataacctcgcatctccacagtatttggcagataagggttataaattccttaataccaacggagactggtactatgttttgggaagaacacctgaaacgggtggtggttatattgagaaagcgattgccaatgcagctgctactccatttagacaactcccaagtacaacgtatcctgaaacatctttgccgatgatcggtagcatggtagctgtttggtgtgataccccaagtgaagaatacatcgaaaaaaatgtctttgatctcatggaagcttttgccaaccacaacaaggactatttcaaggcggacttcactgctcttagaaaagcagttgctacggtgccaacagatctagacatttacacaccagaatcgcgcgcagcccttgcgaaagtcttagatagcttgaattggaatgtgagccgtgctcatcaagatcaggtggatcaagaagtggccactctgactcaagcccttgcggggctcaagccaatcacgcaagtaggtagcttggctgaaaatgacgtcaaagccctagtggaagacaaaccaagtcttgaaatcgtagaaaaagaacttgattttgaccttgtggaacggagcaatccagatctcgctaaaggagaacgcaaagtgatccaggctggggttaaagggcaaggtcttgagtatgtagaggtttcggcacttgatcaaagtcgaaaagtgattgctacagaagttgccacagagccggttgcagaaattgttgaagtcggtaccaaagaagtcgtgatcccaacaagcccttcagtagaagcgccagtgaagtcagacgtgctcgtaaacaaagtggttccagatccttcaacacctcaagtgatctcgaaagatcaaccagttgcaccagtaaataccccaacgccaattccagcagctgtagaaaaagaggttcgttcagaagcagtatcttctaacaagcaactcccagaaacaggagtggaatctgcacttggactcgctttactaggagcgatcttaggagcagcaggaatggacttgaaaaataaaaaaagagactaagacctagtagatttgtaacaggtcgaagttaggagagtgggacagaaatcggtaattcgttagaattcgatttcgtcgtcccacctccgcacagttgagtagggctgtaaaagctgatgaaatcagcgtagtagagcccactcaaccactgcgtcttgatcgacaatccaaaaataattgagaggctaggacttttctcccagcctcttttttttgcttacaaaactgtacccggacagtttgaatttttcactcttgtaaccccttctatatcctgctaaaataaaaccatgacacgatacaaagcaaccatttcatatgacggtaccttgtttgcagggtttcaacgtcaaccgcatgcccgcagtgtgcaagaagaaatcgagaagaccttgacgcgcctcaatcaaggaacccctgttaccgttcatggagcggggcgaacggattcaggtgtccatgctcttgggcaggtgattcattttgatctcccccaagcgcgggacgaggagaagctccgctttgccctcgatacccaaaccccagaggatattgatttcatccgagtggagcaagtagaagatgactttcactcacgctacaagaagcacagcaaaacctacgaatttatcgtggattatggtcgtcccaagaaccccatgatgcgacactatgccacccactacccttatcctttggatgtggaaaagatgcaagcggccatccaaaagttggagggaacccatgatttcaccggtttcacagcttcaggaaccagtgtggaagacaaggttcgtacgattacagaggctcgcttggtcgaggatgcggaacatcatcgccttgtctttaccttttcgggcaatggttttctctacaagcaaatccgcaatatggtgggaactttgttgaagattggaaatgatcggatgccgatcgagcagatcgatctaattttagaaaagaaggaccgcaatctagcaggtcctacagcagcgccaaatggcttatatttaaaggagatccgttatgagtaatgaattgattctagctatttcaggaaatgatatttttagtgggggaggtcttcacgcagaccttgcaacttatacgactaacaaacagcatggttttgtagcggtgacttgtttgaccgctatgacggagcacggttttgaagtgattccggtggatccaacgacctttgcgcagcagctcaactctctcaaggatgttcctttttctgcaattaaactcggccttttgccaaatgttgaagtggcagacttggccttggactatgtcaaagcccatgcggagattcctgtggtactagatcctgtcttggtctgcaaggaaagccatgatgttgaagtttcagctcttcgagacgaattgatcaaattcttcccttatgtgactatcattacgccgaacttgccagaagctgagatcttgacccaaagcaagattcaatcgctcgatgatatgaaggaggcagcgcgcaagctctacgaattaggagcagcgaatgtcgtggtcaaaggaggcaatcgtctcaataaagaaaaggccatcgatgtcttttatgatgggacggacttcaccatcattgaagagccagtcttagaaaagaacaatacaggagctggttgtacctttgcgtctagcatttccagccagttggtgcaagggaaatctccacttgaagctgttaaagcctctaaagactttgttttccaagcgattcaacattcagaccagtatggagtagtacagtatgacatctaatcgaactcaactcattgcccgcctctctattttgacagccttgacagttgtacttggctactataccaaacttccaactcctacagggatcgtcaccctactagatcttggtgcctatttcacagccttctattttggacgcaaggaaggtgctattgtaggtggtgtcggagccttcttattggatctgatttcaggctatcctcagtggatgttctttagcctcctctttcacgggggacaaggctatttcgctggcttcaagggcaaagctcgttacctaggcttgctccttgcaacagtcgtcatggtaggcggttacgcactagcttctgctctctttttaggcaatggctggagtgctgctatctcggacattccgaataacctcgctcagaattttgttggaatggctttaggctatgtggtctattatgcatttccaaagaaaggaagctaattcatggatctggagcaactgaagaaggatacgaaagaaatcctggtagatgtcttgggaaaaagccgtctccgccaaggacagattctagtcctcgggatgtcttcaagcgaaattgcaggagggcaaattggaaaggcctccaacatcgatattgctgaagctattgtccagaccttgctagatgagttgaatccaagagggatttatctagcggtacaaggatgtgagcatctcaatcgctccttggtggtcgaaagagaattggcagataaaaaggagttagaaatcgtcaatgtccttccgagtctccatgcaggaggtgttggacaactcgcagctttcaagtattttaaggatcctgttgaagtggaatttatcacagctcaagccgggttagacatcggagatacctcagtagggatgcatgtcaaacacgtgcaagttccgattcgccctatcttgcgtgaactaggtggcgcccatgtcacagccctcgccagtcggccaaaattgatcggtggcgcccgtgctctctacctcgatgatcccatccgaaaatcataattagaactagtttttaagggctagtttttttggatgaaaagagaggcaaaaacgttttaaaacttgcaatttcaaagttttgtggtaaaattataaggaatgactatattattttaaggagagacagaatgtctgtatcatttgaaaacaaagaaactaaccacggtgtattgactttcacaatcagccaagagcaaatcaaacctgctttggaccgtgtgtttgagtctgttaagaaaactttgaacgtacctggattccgtaaaggtcatattccacgcccaatcttcaaccaacgttttggtgaagaagctctttaccaagatgctttgaacgatcttcttccagcagcatacgaagcagctgttaaagaagctggaatcgaagttgtagcacaaccaactttcgatgttgtatctatggaaaaaggtcaagactggacattgacagcagctgttgtaacaaaacctgaagtaaaattgggtgcttacaaagaccttgaagtgtcagtagaagtttctaaagaagtaacagacgctgatgtggatgctcgtatcgaacgcgaacgcaacaacttggctgaattggttgttaaagaaggtgctgctgcagaaggtgacacagttgtgatcgacttcgtaggttctatcgacggtgttgaattcgacggtggtaaaggtgacaacttctcacttggacttggttcaggtcaattcatcccaggtttcgaagaccaattggttggacactctgctggtgaaacagttgacgtgatcgtaacattcccagaagactaccaagcagctgaccttgcaggtaaagaagcgaaattcgtgacaacgatccacgaagtaaaagcaaaagaagtaccagctcttgacgatgaattggcaaaagacatcgacgaagaagttgaaactcttgctgaattgaaagaaaaataccgcaaagaattggcagaagctaaagaagaagcatacaacgatgcagtagaagcagcagcaatcgatcttgccgttgaaaatgctgaaatcgttgaacttccagaagaaatgatccacgaagaagtacaccgttcaatcaacgagttccttggaaacatgcaacgtcaaggtatctcacctgaaatgtacttccaaatcactggaacaactcaagaagatcttcacaaacaatacgaagcagaagctgaaagccgtacgaagacaaaccttgtggttgaagcagtagcgaaagcagaaggcttcgaagcaactgaagaagaaatcaacgctgaaatcgaacaattggcagcagattacaacatgccagttgaacaagttcgcaaccttctttcaccagaaatgttgaaacatgacatcacagtgaagaaagcagtgaacgtgattacaagcacagcaaaagtaaaataattgagattaaaaaggagagtcgcgaggctcttcttttttctgatttcatggagaatcctggaattttcctttgacgaaaggggaaatttatcgtacaatagagtgtaacgataaaatgcgtgatagatttagtgacgagaagttttcaatctgtcattgaggataggatgaggtttaagaccggatccttctccatttaggaaatgaaacataaggagatttacccttggaattagaagtatttgctggacaagaaaaaagtgaactttctatgattgaagtggcacgtgcgattttagaattacgcggacgtgaccatgaaatgtactttagcgatcttgtaaatgaaattcaaaattaccttgaaaaatcaaacagcgagatccgtgaagctcttccattgttctacacagaattgaatgtagatggaagctttatcccacttggagataacaaatggggccttcgttcatggtatgccatcgatgaagttgatgaggaaatcatcgctcttgaagaaacagacgaagacgaaactcctaagaaacggaagaaaaaacgtgtcaatgccttcatggatggagacgaagatgcgatcgactacaacgatgacgatccagaagacgaagaagtttacgaagcagatccagctctttcatatgatgaagaaaatccagatgatgaaaagagtgaagtcgaagcttacgatgctgaaatcaatgaaatcgtaccagatgatttgggtgaggaagttgaattgagcgaagaagacgacgaagaagaggatgctgaagacgaggaagaagaataaatcataataagaggctgggacaaaagtcctagcctctcaattgtttttggattgtcgagcaagacgcagtggttgagtgggctctactacgctgatttcatcagcttttacagccctactcaactgtgcggaggtgggacgacgaaatcgaattctaacgaattaccgatttctgtcccactctctttttgtttgcattgaaaaaagtggcgaaatggcgtatgataaacgtgtaaggattcctaaataggaggtgttcagatggactttcgtttagatcaaagtttagtagctcttggtattgatacggttgtggtcggaattgctagaaatgtggacccccaagcagttttacccccttcttttcttgaaaagaagaaagtagttgaacaatgggcgctccagtgtcagacagaagaagtagcgacatcccctgtcatcaaagggtatacagacctcttacaaaaagtagggcgtagcatcaagaaaaatcccccaacagtcctagctcttatccgaaacatccagcatcgaggagctcttcctcagatcaatagcatcattgatatctataatgtcgaatctctgaagtcttttctcgcgatcggaggacatgacctagataagattgagggaccgattgaatttacagtgagtcaaagagacgatctcttcctcccgatcctttctagtgaaaaacgtgtcgcaccgacagatcctgtctaccgggatcaaaaaggagttctggcttggttggatgtacgcgatagtgaccattacaaatttgaggagactacgcaaaacgccctctttgtcattcaaggaaataccgagacatcagtcgagatgcgtttagaagcactggagcgaatccgcaaggaccttgctctttgcatgtctcagcttcaatttgagaaatttctcgtcacacaaaatggagtggaaaaggtctcgtaaacagcgaaaatcattttcatgaaattttcaatttgacaaagtagaccatttgcggtaagatattgttcgggcacctcattttgaggtcggagctccctaaggattagggagctatttttgttttttctgcaaagaggaatggcctctacaacattagaagaagaggaaagcacatgtcaacaaaatatatttttgtcacgggtggtgtcgtatcatccatcggaaaaggaattgtcgcagcaagtcttggtcgcttgctcaaaaatcgtggattgaaagtgacgatccaaaagtttgacccttatatcaatatcgacccagggacgatgagtccttaccaacacggggaagtatttgtcacagacgatggtgcagagacagacttggaccttggtcactatgaacgcttcattgatatcaatctgaataagtactcaaatgtgacaacagggaaaatttatagcgaagtccttcgcaaggaacgtcgtggagaatacttgggcgcgactgtacaggtgattcctcatattacagatgccttgaaagaaaagatcaaacgagcagcgacaacgacggattcagatgtcatcatcacagaagtcgggggaacagttggagacattgagtcccttccattccttgaagctcttcgtcaaatgaaggcagatgttggtgctgaaaacgttatgtacatccacaccacccttcttccttacttgaaagctgcgggagaaatgaaaaccaagccgacccaacactctgtgaaagaattacgtggtcttgggattcaaccaaatatgttggtcatccgtacagaaaaatcagctggtcaaggaattaagaacaagttggctcaattctgtgatgtcgcaccagaagctgtcatcgaatcactgaatgtggaacatttgtaccaaatcccattgaacttgcaagcacaaaatatggaccaaatcgtttgtgaccatttgaaattggatgttcctgtagcagatatgacagaatggtctgcgatggtcgacaaggtcatgaacctcaagaagcaggtcaagatttccttggttggaaaatacgtagaattgcaagatgcctacatttctgtcgttgaggccttgaagcactcaggttatgccaacgatgcagaagtcaagattaattgggtcaatgccaatgatgtgactgctgagaatgtggcagaactccttggagacgcggatgggatcattgtcccaggtggttttggtcaacggggaacagaaggaaaaattcaagccatcaggtatgcgcgtgaacaggacgtaccaatgttaggcgtctgtctggggatgcagttgacctgtatcgaatttgcccgtcacgttttaggcttggaaggggctaattcatccgaattggatccagaaaccaagtatccaattatcgatatcatgcgagaccagatcgatgtagaagatatgggaggaacgctccgtctaggtctttacccatctaaactcaaacgaggatcaaaagcagccgctgcctatgacaatcaagaagtggtgcaacgtcgccaccgtcaccgttatgagtttaacaatgctttccgtgaacagttcgaagaagcaggttttgtcttctcaggcgtttcaccagacaaccgtttggtcgaaatcgttgaaatcccagaaaacaaattctttgttgcttgccaataccacccagaattgtcaagccgtccaaaccgcccagaaggactttacacagcctttatcacagcggcagttgaaaaccacgatagcaaataagaatcaagggagcaggtcgaaggacctgctccctttttgtgagaaaatgacaaactttgaaaaaagtttgaaaaaaatcttgacaaaaaagtcgttgattgatatactagtagagtactcaatcgcggggatggcggaattggcagacgcgcaggactaaggatcctgtgaccgctttaggtcgtgagggttcaagtccctctctccgcatcggatcaagatagcttcggctatctttttttatttctaaaattattttagtagaacagaaggaaagtgaaatgagctataagagtgtttgcatatccttattttgattttacagaggtattgaaatctccgaaaagagggaatcctcctcatttatcttaagaaagtgcttaaagatacaggaaaaactagcaatttcatctaaaaagtgataaaataaacaatgtaagtgggattagccccacaaaaatatataggaggcctatgactaatggcaatcgtttcagcagaaaaatttgtccaagcagctcgtgacaatggttatgcagttggtggatttaacacaaacaaccttgagtggactcaagctatcttgcgtgcagcagaagctaagaaagctccagtacttatccaaacttctatgggtgctgctaaatacatgggtggttacaaagtatgtaaagcccttattgaaaatcttgtagaatcaatgggtatcactgtaccagttgctattcaccttgaccatggtcactacgacgatgctcttgaatgtatcgaagctggttacacttcaatcatgtttgacggttcacaccttccagttgaagaaaatcttaaattggcgaaagatgtcgttgaaaaagctcatgctaaaggtatctcagtagaagctgaagttggtactatcggtggtgaagaagacggtatcatcggtgacggtgaattggcaccaatcgaagacgctaaagcaatggttgctacaggaatcgacttcttggctgcaggtatcggtaacatccacggtccttacccagcaaactggaaaggtcttcaccttgaccacttgcaaaaattgactgaagctgttccaggattcccaatcgtattgcacggtggatcaggtatccctgatgatcaaatccaagcagctatcaaacttggtgttgcaaaagttaacgttaacactgaatgccaaatcgcatttgcaaatgctactcgtcaattcgtacgtgaatacgatgcaaacgaagcagaatacgacaagaagaaactcttcgacccacgtaaattcttgaaaccaggtttcgaagcaattactgcagctgttgaagaacgtatcgacgtattcggttcagaaggcaaagcttaattaaaaacaggaaagcaaggtcccgtgtggatcttgtttttttgtatgggaaaggttgcttccaggggttaatttttgtacaatatgcctatgaaaaaattcaaactgtggagctggatcgtttgtggctttctcctgctctttttaggtgctacatttgtttttcatcaattcagtttacgaaatgaaagtgagcttctcacacctattggtaaacaagttacagtcaatggacatcgaatgaatatctctgttaaaggagaagggcctcaaacaatcgtttttctttctggtgcaggtatcgcctctcctatcctagactttaagaatctatcagatcccctatccaaaaaatacaaggttgttgtcgtggagcgagcaggatatggttttagccaagatagtgatcgttcaagagatgtgatggaggtcctttctgagacgcgtcaagctttggcgcaagctcatgtttcaggtccttatgtgattatttcgcattcaatggctagtttagagagtcttgcttggcaagagaaatatccgaatgaagtgaaggctttgattggcctggattgggccttgccagcaagttatgaagatttaaaggataatcaggccttgcttactgtggcttattggagcagtaagattggcttattacgctatttccctgagtccttttctaccatttgtcaagtatatcaaggtatttgatgaaaaatagtttgagttccatatgtcaaacgaaggaaattgtctttttttgagctaaagtttagtgtaaaaagtgtacacaaaaccaacaccttacctagtgattttttttgataaggtgttacaataatatggcataaacaattttaccgattttgggtagaagtataatcgtaaagtttgttatgcgttatgaggtaatacattgttctgatgagacgatgtatagaggcaaggattttcatctcttaatcagttagattttttgaattcttttaatattgattattatttttctagtccttataaacgagcatttgaaacgattaatagctcgccaattcaatttgataaaatagttcctgataatcggttacgagagcgaaaattatcctcaagatttattgaagatactgagtttgaaaaaacaattcaatatttatggcaaaatccagataaatctcttattggaggcgagtccaatcgagaagcattaaatagaattttagatttatttgaggacttggaagaaaggtattcagataaaaccattttactgagttctcatggaaatttgctaggaatcttaatcaatcattttgattcaagttttgattataaaaaatgggaacagatgacctttccagattgctttctagttgacaaagatgagagtgtgaaaagaattatgaaagttacttctaggtaatcatttagttcaatctatgtgattttattttctgttattacaaatagaattgaaggaaaaatagccatgatattcgatcagtccttgcaagcctacctacatgaagtagatgatgttcttgtagcttgggaagaaaaaccaagtggaaactttgagatggaagctcagttgcttgcagccaattaccataaaaatctttaccgtattcttgcatttatactgcctcatttacaagaattttatgggtatttcacagatgaagaagctactgaaaaattgggtaaacccatcatcgagccagaaagacaaaccgttactttctgcgatcaaacttttgatgatattcatatcttttcttttgactatcaggggcagtcatttgagagtctggagaattttgccattgatggttaaggtctgttttcagttttaaaaagaaggagagagactgatgagtactgctgattttgtctttattgagagtaaaggccccatattcctagatttacaagccttttgtactgctttgagagaaaaattcccaggtgttttgatcagagaaaggattaatcctgaaaaagcttactcgctttcttgggattatcaaggtcctcagtttaccttggaaagttctttgagtagcaagaaaaatgtttttgtgataaattactttgattcacataatagggttcaggattatgcttgctatatcatctggcttcggaaatggtttccacctgaagagaaagcttccttttgtgatgaaggatatgagtatgtgtttgaacttcctagtgatttatcccaaaaggagtttgaaaactacttacgaacaaggtttgatgagtgaagaagaagttcgaaaacgaataatgatatggaacagttgaaaaggagaatcagatgcttactaaagatgatatgttagttgctttgcatgatgcaattactgaagaccaagaatttgagttggcagacgagattgtagatgccatggaggcttcccctcaaccctttgatttggttgctcccatattagaactcattgctaaccacccagaagttgattttggttctccaggtgaattggtacactttgtggagaagttttatcatcaaggctatgaggatttattgttggagtcagttctaaaaagtccaactgtgcataacatctggatgcttcatcgatgctataatgacaatgatccaaatctagtccggcagattcagactttggttggagaactgaagaaggataagactcttgattcacaagtaagaagcatgattgaagacttaacttggtagaggtaggtgatgcagcatcacctttttatcttttcttagggataaaaattttcgatataaattaacacttgttttccttagacatttgcactataatagggtgttattagggctttctttccttatgttgaaaaaaaggcagattttaggagatagatatggcaatgatagaagtgcaacatcttcggaaaaattttgtgaagacagttaaggagccggggttaaagggagccttgcgctcctttattcatcctgaaaagcagacctttgaagcggtcaaggatttaacttttgaagttccaaaagggcagattttaggatttatcggggcaaatggtgctgggaagtcaaccaccatcaaaatgctgacaggaattttgaagcccacatctggcttttgtcggattaacggcaagattccgcaggataatcgccaagattatgtcaaggatattggagtcgttttcggacaacgcacccagttatggtgggatttggctctgcaagagacctacacggttttgaaagagatctatgatgtaccggactcgcttttccataagcgcatggactttttgaatgaagttttggatttgaaggaatttatcaaggatcctgtgcggactctttcactaggtcaacggatgcgggcggatattgcggcttccttgcttcacaatcccaaagttctctttttagatgaaccgactattggtttggatgtgtcggtcaaggacaacattcgtcgggccattacccagattaatcaggaggaagatacaactattctcttgactactcatgatttgagtgatattgagcaactctgtgatcggatttttatgattgataaggggcaagagatttttgatggaacggttagccagctcaaggagacctttggaaagatgaagactctctcctttgacctgacgccaggtcaaaatcatctagtctctcattatgagggtttgcctgatatgtccattgatagacaaggaaatactctcaatattgaattcgatagttcccgctaccagtcggccgatattatcaagcaaaccttatctgattttgaggtccgtgatttgaagatggtagatacggatattgaagatattatccgtcgcttctatcgaaaggagctctaagatggtcaaattgtggagacgttataaaccctttatcaatgcagggattcaggagttgattagctatcgagtcaactttattctttatcggattggcgatgtcatgggtgcttttgtggctttttatctatggaaggctgtctttgattcctcccaggagcctttgattcagggcttcagtatggcggatatcaccctctacatcatcatgagttttgtgactaatcttctgactaggtcggattcttcctttatgattggtgatgaggtcaaggatggttccattatcatgcgcttgttgcgaccagtgcattttgtggcttcttacctctttacggagcttggttccaagtggttgatttttatctctgttggactgccatttttaagtgtcattgttttgatgaaaatcttatctggacaagggattgtagaagtactgggattaactgtcctttatctctttagcttaactctggcttatctgattaactttttctttaatatctgctttggattttcagcctttgtatttaaaaatttatggggttctaatctactcaagacttcaatagtggactttatgtctggcagtttgattcccttgacgttttttccaaaggtggtttcagatattctctccttattgccattttcatccttaatttacactccggtcatgattattgttgggaaatacgatgccggtcagattcttcaagcacttttgcttcagtttttctggtttatagtgatggtgggcttgtctcagttgatttggaaacgagtccagtcatttatcaccattcagggaggttaggatgaaaaaatatcaacgcatgcatctgatttttatcagacaatacatcaagcaaatcatggaatacaaggtggattttgtggtaggcgtgttgggagtctttctgactcaaggcctaaacctcttgtttctcaatgtcatctttcaacacatcccctcgctagaaggttggacatttcaagagattgcatttatctatggattttccttaattccaaagggattagatcatctcttttttgacaatctctgggctttaggtcgacggctagttcgaaaaggggagtttgacaagtatctgactcgtcctatcaatcctctctttcacatcctcgttgagacctttcagattgatgccttgggtgaactcttggtcggtggtattctattaggaacaacagtgactagcatcgcttggactcttccaaaattcctgcttttcctagtttgtattccttttgcgaccttgatttacacttctttaaaaatcgcgacagccagcatcgctttttggaccaagcagtcaggtgccatgatttacattttctatatgtttaatgattttgccaagtatcctatttctatttacaattcgcttcttcgttggttaattagctttattgtacctttcgcctttacggcctactatcctgccagctatttcttgcaggacaaggatggactctggaatattggtggtttgattctgatttctcttatcttcttttgcatctctttaaaactttgggacaggggggtggatgcgtacgaaagtgctggttcgtaagaggtaaagtaagactaaaatcaagaaaggaacttatgatgtttgtaattaaagaagtcaagtatgaagatcaaaaaatggcagttgtcgctgagattttaagggatttgccagaatggtttggaataccagaaagcacgcaagcctacatcgaaggagctaaggatttacgagtttgggctgcttatcaagaaagtgatgtagtagggtttataagtttatcatattcgagtgaagattgtgctgaaattgactgtctcggagtgaaaaaaacatttcaagggcaaggaattggaagggaattaattacgactatagaaagagaagcagtcaaacaagtggactacctacaggtcaaaacagtcgcagaaggttcaaataaagattatgaccgaacaaatgtcttttatcgcagtcttggttttaaaaaattagagatttttccatctttatgggatccgcagaatccatgtcagattctgattaaaaagatcaactaaaagtgcttgacatccgctctcagagtgctatactaagaaggtaatcgccgatttagctcagttggtagagcaacgcactcgtaacgcgtaggtcacaggttcgatccctgcaatcggcatcaaactatacaagaaaaagcctattgtgacgggctttttttgatgttgaatcactttttgtaccaaaatttgtaccagattattataaaagttttcggatgttttcaaattcatcgttaatcttctcttgtaatgtatgaccatatacttccactaacatagaaatatctttatgtcctaatattttagcaatcacccctaaatcaatttgattatgccatagataactaccgtaagtatgacgtgtccctttggtagtaatgataggtgagatatttagtctcattaaaacattctttaattctttattaacagtagcattatttggaatatcttggacatatccataatgttgaaaaataaagttgttctgattaatgatttcaagttctttattcaatcctatttgcgatctttttagattcaccagcatatctatttcttcgtcagaaataggaatagttcgtattgatgttttattctttggtggaacaaatttacgagtagacgtgttgtaccgtctgtatgtcttgattactttttcttcaaaatttacatcttcccaagttaaagcaatgagttcaccgaagcgcattccagttttgaaaagcaaataaataacataaggtacaacagatcttctataatccaccttttgttttaaatgttttaggatatcgtttagatctttttcgctatgaatatatttttcttcgacaggttgagactcttttgacgaaaatagttcagtaaaaaaagtaaaatcatcaacaaaaactttatcagcttgtgctgttttaatacattccttaatacttgtatgtagccttgataatgtatccctggttactgttttaccatactcattcattattcgctgatatttactaggctttatttgagatacaggtgtatctccaaataattttttaataatcttctttctaatgatgtacttgttttttgtggtttgacttcgtttactaggtagtatttttaaattgagccactcttgatatagctgataaagtgtcattttactatcaagggtatatccacgatttaactttcttaacaatttttctgcttctatttgggcttttttcttggtttcaaaaccacttttataagcaattgttttacttgtttcatcccttatggtataagtccaaagattctttttacctcgttttaaatacctaatgctagccatactacaactccattcccaaaacttctgatacagcacttttaggtacaaccatcagacgttttcgatcgtagaagctatatcctttattcaccattagttctcttgcttggtggataatttgaatagcagtgtattgtttataacccatgtttattaaatctttttgtgaaattgtattatttgtcattttagattctcctttctaatgtcctataacgtatgtaaattgtttggcagtttctgcgtcaaaggtacggtaactaatgacccctaacccttttacattacactctgagacgagaattgaaccgtctgatttgacctgttccacaaatgaaatgtgtccgtatattgggtcagctccagcttgtccagggctaaacgatagagcagagtgttctgttggtgtatgggttgttgtgaatcctggcttattcatccattgtccgccatttcccataaatggatcaaagttgactccgacttgttttccacggttgaagacataccaggtacattgtccccaaggataggtactagtgatatatcctgtggtatcaatagctgttgtcaaactataacctacaggtatatcatttgaagttactcctccaccatctctagtttttcctgtcgtttgtttgggtgcttttggtgttcctccatgttcatcaatgaaggcatctagtttttgcatggtttctgcacgtctttttcctgatccagtggtatctgtgaaatagacgccaccatcagttgctggattgagtgttccattcgcaaactttttagccttatcatcttggattttaaaagtttggtttttatttccaatgatggtttgttgagttagtccgacaacagcaatctcatcattaaagttattggcatattctggattggagtcataggctccaaaaccaaacatattagctccaggattagtagctactccagcagttccaagagagctttcattcagtgcaatcgcaacaattccacggacatcaagatttgatttagcttcccattcgaggagctttttaccattaattcgattcttatcataggagattcctaaggtatctaaaaagccgtctaattgctctgccgtgataccgaagcgatggacaagtaggttgtgtgtatagggatctccatcagaccagtgatccgcataagtcactccattttgggattgggttgagccattcgttccaccacctcctacagctcccataaggataatgataatgaggaccggtagaaagagaggaataagaccagctaatagaaaccattttagttttttcatcgaatctcctttctagttaatgtcttatataagcagtgaacaaaacagtcccaaaacgccattttgcatctaaaacgactgaataggacttagcctgtaggatgatttggtctctttcttgttctttgactggaaacaaaagaaggaaatcgactgagcgttttccttcttggtaggcctgataaagagtttcttcaagaactcttggaaaagcagttcttgagcgtatcttggtattcatatcattctcctctaagttgttttaagcgttctgttaatcggtctcttcgttcaatattggctcttaatttatcatctcgtgtcatggttttcctataagcacgagtgaaagcattcgatccttgggctttgtacatggcttgaggatctttatattcctctaatttgcgctcaatattattaatgcggagttgtttaaatggagaaatccattcttctttaagagtttggaattcctcgcttgaacttgatgttgactccgctgtgattggggattccattgaaggagttggtcttttttcttcaaccggtttaaccttctcaggaattgcctttgttttcggaatgtttggttcaggagtatctggatttgttggcgtctcaagcgtttctgttgggagcacttcatcgggttggtgctctgattccttattagtaaagaaggatccgacattttggaagtgactcttggcattcatcatcattccagctccaaaaccagcacctgctagggcaaagtttccaaggtgttgagcagatgaaagacttctagatggtacttgtgaagccacctctctggtctttgtgactcccttttcaactttgtttccaatgtcactcgccaccattcgtgctttagagccaagaatgaattggatcaactcagctttgtatttccatagaaggaaatatacaagtccttttgagacaactgaaatgagtagtttaaagacaaggccgaaaatgatcagggatggaagagttttaagaatgccatcaaagcctgtaatgacgatattttcaatcattttctcaatgtagaagactaatagagttaatagactcgtgatagctggaaaaagaagcccgccaaacatcacttttagtacaccaaaaattaaatcttgcattcttggtacaaaggacattagaagtacaattggaaagagcaggatcatcatcaagacgagtgtttgcgcgatgacgtttaacatttgaatcaaaataaccggtatcgctaatacgaaggcttcacaaattttgaagatgacgtaaaacatacgagtaaagatgaaatctggcatagctgagacccaacggttcttttcaccatcatcattggctccatttcctagttcatctagatatttattgcgatctttcgatttaactgctttaaagtttccattcttatcgcctgttcctagtaccttactatcatcaaaagtttcttgtttcccatcttgactattcttatatttcccattttcttgacctgtattgacaaagacataagctttataagaagtttctgcaatatagctatctgccatggaatcgccaattttaatggatttattattgccatattccaccttgatattcgtgatatttttagtgacatcttgagagacatggttgatagtatcaagtagatacagaccacctgaagttccagcaattgttccaaaataaccaaaaccaaggatgagaactagaaagacatgaaggagtgttcttgaaaaagctcctttcgaaaagaaaaactggtaaaagagatagaaagctaggattagaagcaacattgaaacgagtgattgttttgcgactccaccagaacttgaaccgatgaatcctttccagatattcatcgctccattaaagacatagtttttgtagttggagtagagatcaatcttttcaagaatccgaatcagcaaagaaaagaagcccactactgcgtttagaatgaaaaagaagaagttgacgaaaagctcattaatcagaacccaagccccgttaaaggaagcgaacccagtcggctccatataagacttgagagagaagatatcgactccccttagtttgtcaaaagcttcttgcatggattcacctcctaactagcgtatttattttcaaggcttgatgatactgtagctttcattggttttagaagcatatcaatatcttcaaagatgttgtgtacggaaatcatattgagattgccatagacgtcatagtacaggcattggccagagatcatattgtcaatccattcaagattgctttcagtgacttctagattgacgtgtttcaagatatcttctcgttctgacttttcataaaaagcaaagatggtaccaaaacctgttgtatcatcgtcattttctgcatcatgtacagattgagtaatcagtgccaaggtattgtttttggagcgtccaatccgacgcatatttttgataacggcttttccttctgcggacttcataagaatccatgcttcatcaaagaactcaatggtatcttcattttcatttcgttctccaaagtgggtacagaaggcaccaagcgcaaacatgagggcaatagaattgcgttcatgatctgaaatttttgtggaatcgtcttttggtagtttgaggttattgacctctagaatggtcactcttgattcatagttaagtccttgagtggttccatctgaaaaggctagttccaagatagagtttgtgacaattgaggtcagataacgaccaaccgaagcaatttcagaggaagtagagtctctcagaacttttaggacgtgtttaaatccgactttctcaccagcgactcgtttttctacaatcgcattaatagcttctgtaatagctgttttttgatccattgtgacatcatccacagcttgtagtagaaactcgagcatgttctttgcgacctctacagcttgttctttatctagaacgacaataggatctaagactccgtggtttgatggaagcgagctatctagtgtcacaaagttaaagttttcaatctgtttcttgcgttcaggatagaatcgtgcaaattcaggtgagttgattacttcttggtagtgattcctaagttcacgtttagggtcaatataaagtgttttgacattctgtaaagccacacttaaaaagatgatctgagcaaggaaagattttccttgtcctgttgcgcccgtaatgatgatatgcgggttcttggtaatctttccagctatatcttctttatttccgactgtggcattgtagaggacaatgttctttgaggaatcaatagctttagcgatattgtcccaacggcctgtccagttgtctactcggccaatataccaaccgatacgatttccagaagaggtattggtgaagggcatgagttctgaaaagccacgagctgtgaccatatgtgtccaagtgcgagttttcttttggaggttttctccataaagcagcgcttgaaagagataaggtccgtcttgagaggcttcactaatttcgactcccatatcatcaaagtagttcaaaaccacttgccgtctttgacggagttggttcacactagaagcagagacaatcagataggctccatattcgatgatatcttccttgtttccgactttcttcattaagtcctttagggagatagaacccatgataatctcgtcttgttggacagtatcggtattttctgcctcctccatgatgtttctgtaacgtgtattcgaacgtcccattcgaccttttatcttaccggtatcaatgaattctgccttgattcgtagctcaactggaaagtttaagcgttagataaattctccaagatgaaagccattgaattgaacagggaatttccctacaggaagaatcgtcacaaaagaagatccataaggactttctaacttgagaaatcccccttttaggactctaatcaaggtgtctgtaatattgaattgagcacgattggcgagcacctccttcttgtagtgaggaatatagcggaggtattgcatccgctggtaataaaagagttcttcatttgataaccgttttgcccgaaggacggagaaagcttggaaaattgtgaattcatcacttttatagtcttcataccaggtagggcttaactcatattcatagccaagacccttggcaattttttctgagaactcattgaagctctcataggccaagtctttgacggtcgctccatgattttgtttgcgtaaggtaactcccacgacccaatcaaattgataggggatctccatttcatctgttaggcgatccactgtgtagagaagaagttcttctcctagttcacgactatcatctgctagagcatctgaaaagtctcgcattttctcttctaagagatagtctttagggatcagagatatttcaaagaacttgtttttctggagcttcttcatcatttgagcaaccgtaattttatgtttgtcctttttttcatcatctgtaatggtgatgggagtgtttggaatacgataataagcaacgactgtttgatcttttttgagagctagattttcatgtgtttccctaataggataggttaaagtaatactcataggtcctccttttctatagatttgttttttcaaagacaatttcttctacaggctctatccgatcttcatggtagatagcttttttattgatcttaaagtcccaaaagtaaattaggtaatctccaataaagacgtgcatctttttaccgtgaggctcgtattcagtatagaacttagccaatttgtaagggagataccaatagagcaagagagaaattgagtgagtgatttttgcgagtggcacaaagataaaacctccaaagagtaacatggccacaaagacgatgataaaaacaatgaaaaaggacaactgcatgggtgtcgcaaagtaccatagtcgagtgcccttttttgtcttgatttcttggatccaataaggagcatttaggcccttactgtaatcataaagtctttcttcattcatacttagagtcctgattcaataccgaagagtcgcaggaaccagccgactgcttttaggatatcttgtcctttcgcaatggaaacaataacggcatagaaaccaacgacagagaagagttgaagccaggagctgtttcgccaagccttgatcgctaagagcacggcaatggctgttaggatccaaattccatcgccctggaggaaggttcgtagattgtctgtattcatagagttctcctattctttatcatttgcataattcagtggaatggtgtgttctagttttgtgacatagtaggtcttttctttttctgagagggtaaaggtgaagttttccgagtgggtggtccctccgacctcaaaggttgcttggacataagctattagattttttccatctttttttagataggtataatcaatcgttttgaaggtggtattggctatgatatccacatccttagcaatcaaattgaggttgtcttggttagtagtatagttggtaaagaagaccttgaggaatttttcaacttttttacgctgaccatctgaaaagtgatcattagcagttagttggagctgatcatcttcgctaaagtggccagcttgtgaagattcaatagcagagaaccaaggaaggccagagatatagtactttccatctttttcatcaaatggaatattgaaacctgtcacgatttctttttcttccgtgttattgtcccgacggatagtttccttgtatttaatcttataggtcgcaacttttccttctacagtgactaactgagaatagagaagttcacttggatttcgaacttgaccttgagctttcacatcaggaatgaagttgtaaaagctatttaggtagtcaacttgagcttgttgtttatcgccttcttgtggaagggtgaaataggcatagacgtagtcattcaagtagtactggagcttgtagtcgtattttctactagcctccattggctgtgcgttttgatttttagtagcctctacttgagcttgtagtactcctaccttatttgagagtgtgatagcacgaatagatcccaagagaccaacaaaaaggaggaaagaaattcctcctatgactgcaatattgacggtctttttattggtgacttttagttttggtgggcctccttttttctccacctttttgaagtgtgagagatattcttttgcttgaagcaagtagcgtttggctttatccatagatcctccttttaaagagcagcaagttcaatgagctttgagccctttgcatagagtcgcttattggctttttcgatctcgccgttaatgtaatagtagcctcgtaactcagtttggagttgttcgatcaagtcaggttttaggtctttggcttcttctttttttaggagactatttaattctccagctttggtccaagcctctctgagatccttctttttaagtaattctcccagttcattcgtgacttgagagactttcttttcaaaaatagttttagtggccatttcaatttcctttctaaatgtttcttggttttctttgatggtcttttgaatataagcaatcagtgaggggcgcattttcttatttacgctcaacacttgaccatctagtgtaaaacaggcatgttcatagttatagaaccctctactatctggaagatcttctgtacatctgcctgcacattcgtagtagaagtcctttccctttcgtaagaggatatacatattccagaattcatgttctggaagaagcagaaaatctgcttgataaatcttcttcatcatctcaagaagcctcaagcagatcatcataacctagagcttggtagataaaatctgaatcaaaccagagccagtcattaatttgtccttcggttggcgtatcaccagagaagatatcttcacatatgacggttagagtatctaccccaccacgttcacggacggtgtttaaggtcgttagtccaccagaccaagctttaaagttgtctagtgaattgatttgaactttgtattccatattgcttttcctttctagtgttcatagtgtttattggctttgagaagtcgtaacatggcttttcctcgatctgttatttctccactattttgaatcatcttcatatattctgtttgcaggattttatctgcttcagtgactagtgcaagggagttagcaacttgataggtcagccagcgaatcgttcgctcaatactgtatggttgtgggttagttgaaagttttaagggttcgactcctccaaagagacgttgccatttttcatcgggtttataggctccaaatcgagtgagaccatcatagacttggatttctttattgatgatgcctctagcgatttctccgagatctacaccattgatgtattcttccacaataccttgagctttctgatctgagaagcggagttcatagcgattccatataccaaaaatctccaaggattcgtccaaggagatgttttccattcgagcaatttcatagcgcttttcataaaagttgaagtagagttgactttgacggctcccaaaataaatggacaagccgtgattagcttccatgtcttcattatctgtgaaagatccaccacccgtgatattccatttcttaatcgtgtctaggacaatctctttggaatagagtttgtcaatcaatttgggaatttgaatttgttcgtcctcgtgaccgtaacccttatagagttcatctagagcaatatcgagtcgcttcacccgaacatcttcataggaataaagaatgttttgaagaaagatctgccaagtgattcccttgtcttctagaagcaattccaactcacggcatccttgaccggatagttgaagacaagtttggtaatcattggtcacagacttatcaaagaaatcaaaaatccagatgttccctcgttgccataagtgggtatagttcatgagacgagtttcttggtctgtaaattcgcttaagtgacagtgaaggaagttttcgcagaaagcatctaaatcctttaatctcggaaaggtcaatcggagatagtcgatctgagctcgaagactgtttttatcacaatctttatagtaaccaagtctttcttttagttctctgaacttatcaatcgtcaatcctctttcgcctgtttcataagagcggtaggttcgtgtaggaagatcaacagcttgtgcaaatgctttttgactaagtcctgtttgttttctgaaattcttaatatgaaaaggactaattttgtccattcatcgcaacacctctttctaacaaagtgacacacttttttgacgaaagtgacacacttcataaaaattgaaaacccaactcccataaggaatgaggaggggtggacttggcgtatttgccaaatgtaacccccctaattagaaaacgggggttgaagtttcatcatggcctagaaacttcgggctacggtctgcgcctgacctgcggtcaggcttgcccttgcccttgttctagcccatgatgaacaatcgtcgcttcaactgcttttggataagacctgcgtcctccctcttcaaattgagcgaggatttcaagaagaagtttttcttgaaaaggatccactagaatagcggatacagtccgttcaaagatgatcccttgttctgttaagagatagataatcttgcgtaaggttggcattttaagattttgttcgtccgcaaattctttgagtggtcgtttgtttgattcgttttctatagtctcctcttcctctataggatcaattgtttcaagcggtggtttatattcttcaaatactgagaattcttctccttcaaactccataatcggaatgttagagtaggcatcatagaatgaaaaaccttgatcaagcggtacataaggagagaaaaactcaccggccagctcgccgttgtttgcgatatagccccgtcctttgaccttgactccattaatttcatccagctttttaaactctttagtcttattagcatctccaaacatcatgtcatatcctgttgattctaaatgaccgacggagagacgcttcataaaattatcccgaagagcagttttgataaattcaccatcgggccgttgcatagcaaagatgataaagactccagcttgacggccttctagaactaactgggagaggtattccattagttctgactgttggctatagtcacgatcgatctttgccataagcgctgcccactcgtctactagaatgaattttggtttcatgtcataatgagtaaagttctttccagcttggaattttggcgaagtagacatccgttcatagcgtttttccatgaactctacactctctttaaaacagttaatgatatcttccttactagtatatacccgaccatgaaagactggaattttctttaatccagccaggtcagaattctttggatcacagatatcgacaaagccgactttagctagtgcatagattatggtcatcagaacaacggtttttcctccaccagttccaccaccgatgagaagatgaggttcttcaatataatcccaagatacatctttcatgagctggagttttgatcccttgacttttacttcatcgatggtgattcgactatcaatccgattaatagcaatttcatatttgataaagcggttatcaaaggttttatttcgaaaatctccattaaacatgacttcaagcgtagctccaaggttgaggaagcgatcttgaaatttattaccttctagaatgaaactcacttcaatcttgtagcgagactgtttgatatacacttgaggtaaggtgattttttcaatgatcttgttttcacgtctgacctttttaactagatagaggttattctctagcaaaaagcgagaaagaattcgaaggctattgagcttttgaaaaaagagcatcttcctgtagcaaactcgattgataaaccaagcaagaagcaaagaaaaaaggagcccagctcctagaaaatatccttgaggtaagggatggacttttaattcttctagatgtaagtagctgtagtaactaatagccaacaaaaaaggaaaccaccagataaaccatgtgattccctttagtttacgatgaaaaactcgaactctttttccccgataggtaaagagtttcatcctgcatcacctcctagttttccttcttattttctaccggtttgttttctttagttggtgcacctccagcttttttcttgattttagaagcaaagagcttatagatatcattacgattgacatgggtatgagtaataacaatatcttctagttcaatctcttctcggtatttaatgcccaggtcttcaatttcagactcagacatatctgcgatagtgaaaaagagggtttcatgctggacagaagagtgaatccctccaacgatcccacggatctcacctgtattgacttgtacaaatgatccatcaggatttcgttgcgagcgatccacttcaaagatgatatcaggaccctcaatacctcggaaagtcagtttcccaaggacagctgggacatccaacccgtctgtaataacacgataagttttatcagcaatttgtagtttttctccgtagtttaatccaattttagccatgtaattttctcctttaaattcttattttttgattaccaatttttcagcaaagacattgagataaggggcaacagtattgccatttagagcagtatctgggaaaaagattgggttaaccgcttctactagagaatcttctggaaagaccgttgtagaggctggtgtgatgacatggaaggctccgtgctctgcgctgtttagaatgtgacgttggtatttgccttcttttccaaaaataaatttaggagcatttcccaagcgttcatagtaagcaggaccaataaattctggtttcattttaagtgtttctgagatcataagattttcctttctgagtgtaaaataaaaagagttaagctagttgcttcactcttgagtaatagtgggtaaataatttgcgtttaaacatacgactatagaattgaatatccccatgagcatagccatttctacgagcatcatctgcgagatggtctaaatcaatttgagcttgagcataaagtttagcctgaagtttatcagattcactaaacatgccataggtaaattcgtaattatcatagagtcgtttacattgtagtgcgaaaaaagtttgtcatatcattctcctttattgtaataagtaaaaaagctactaagtgaaaaaaggaaagaacttagtagcttgagagtaggtctatcttagtagatagacagcagtaaagaaaagttatttggttggaaagatccctctttccacggtggcaacgtttagcaaggtgctttgcgtcaattaccatcgctttcccagccaatctctttaggtagtcttgatcatacccaagggattctcttacgccctttggcgaagccagttcactttactattcggaaaagtgcgaaagtccgaaatgcgtggaagcccacaagaaattagtcttgttttctatcttcacttcaaccataaaacggacttgacttttagcatcaaaacatttacaataaaggtacgaagtttatgtgttgttctgatgatcagtcctctggttgtcagacgcactttttatttaattgtcaatgatctcaattggtagggattattattttgattttcaatatcgccaccagctatatttacattttatcgctgttggcgataaaagtcaagggatttttgaaatttttttaaaaaaatttgaagaggaatggctatggcgtttgcagaacgtttaaaagaattacgaaaacaagctcacctaactcaggttgaactcgctaaacgattagggataggacaatcttcctatgcagactgggagagaggcaagaaaaaaccaacacaagaaaatctcgttaaaattgcacaaattcttgatgtatcaattgattatctagttgggaactcagaagaaaaatcagatgaactagataatattgaattgttattccgtatgaactcaagaggtttaaccgatgaagaaaaagaaatctttaaaaaagagttgattgaatttatggaaaagagaaaaaaagcatttgaagaaaacaaataaactaaaaattagcttttttgtttgataacttcattgattaaaaggagtgttttataaatggatgtaaaaaaagaatttttgaaaataatgtcagaacaaaaagaaattgccttagcgacatctgtaaacaatattccaaatgtaagaatagtaaattttgtttttgattcaatcaataatacactctatttcgcatctttcaaagataatgataagattaaggaaatgaaatcaaactctcatattgcatttactacaattccacactctgggaatgaacacgtaaaagctaagggcttagttcaaaaaagtaccaaaactatttttgaagtggcggaccagtttattgctaaagtaccaggttacaaaaatactattgaatttgcaggggaatctttagttttatttgaaatacgatttgatactgcgatcgttaccaaagatctagaaacaatacaaactatagaactttaaattaaagttccaaaaatggagattaaagtatggaaagttttgaaattgaaataccaaagatggagcattttgaagttgatgtcagaaaatcggttgattacttattaggaaacacagaaaacaaacaaactagtgatgtattagaggatattgagctactttttcgtatgaattctgaaggattaacggaagatgaaaaagcagttttcgaaaaagagttaattgagtttatggataaaagaaggaagatatttgatgacaaaaaataaaataaatatagttaatgaaaaaaactttgataaacacttttcatatcttgatgaaaatatgaaaagtagatctaataatatgatacataaaataacttgtattattgaaaaatataaaaaatatcagaagaaattaaatacagttactgaagaaaatgaaaacttaaagaaaaatagaaaaaaatgtattaagaaccttcaaaaatttataaaaagaggagagtgcatagacgaatttgatgacaaaaaattaataatagattattattacaacgaaaaggaagacaaattaataatcaatgatatttatttgtataaaaaaattctaccgaaaaaatcgttttttaagaaagaaatctacaatttaacgcattgtttatttttcgctcttaattttgtaacgtattgtcttattgcgtttactcaaggaagttcattaaatgggaaattaattttgtaccctttctttggtatatatgtaatattaggtggagtatttttattttgtagatttaaagatgatttccataaagattatcgttttgagaggttgggcggggttgaatattataaaactgaggaatacatatcaaataaagaaaataaaatattatttattgaactcaattatttattttcccagttagtactatcccaagcaactattgtccagggattttctgaaccttggattacttttatcataattatcgcattgatcactgatatatactttttcattaatattttccatgtgatatttaaattatctagagttaagggattattttttgttctttgtttaacggtaatacttatactaggatttgtaaaaaaggacacttgggttgctgttgcattagtgattgcaattatttcgttactaacttctgaagatatctggactttatatcaggatgatagccctttatctggtaggtataataccttagctaataaaaatattgttactaaaaatgttttttatttgaaacttgcagttgctactaatgtattaattttatatctttatgtgcttttttttgatgaacaacatttttcccttaatttttttaatatgtttactaacactataagtaaaatttgtgaaaatgatacacgagctaaactattcgatggactggataagctaggttttatttctatagtaaatttgttttatgttattatcaataaaacatttataaaacgtagggataccactttgttaaaggaaattatcacaccaatctcctcaataatttacaataaaatagagacaagtaaattagacctcatagataactatgacggattatctgcagagaatatcaaagagtatccagaactaataattaacaattcaaaatatatacctgaagatacaaaatttttaattgaagaacataaaagtggaaatattttaaaaattgtatatccagataaggagatagaagttattaaattaaacaatttgaaaaaaaattaattgtgaaatataaataattgtatgtggacagatgtccaccttttttatataataaactcaaccgaattggtttagttttgtattttatacttaaaggaggtatcattctttggatgaattgtatacaagaataagtaagtctacaaaacatgtgttataccagtatatgaaagatcatgacatttcattactaaattataatttcaactacttctttcaacactgtattcaagagtatcagattcaagtgattagtcaccacttctcaaatcataagattgaaggattaactgttattgatgaattaggtattagtttttcttatgaaaaggataatcccattgtgaagcaaaattttactctgtgtcatgagctaggacattttatccttgagcatgaaggtaattattttgcggaatctattgataatcaagaaagcctaatagaacgagaagcaaatatcttttctgctgtagtattaatgcctgacattgttttgttgtcaaagatttattatagttgcgacacctttcaacacattcaaaatagcctggatgtttcaaaacaggcattgttctttcgccttttagaccttcttagggaatattatcctggaaaagaaaataccattaagcaggcgatcgatgcttatattgatggacaaaatgccacccttctccttttgtttcatagcataaaagaacatattataaaggagtttaacaactaccagacttctctaattaataagatagagccagcagtgagcaaaagaggtttcgttactagtcaagagtatccagaacttctaaatctagagaattggaaaacaataaaggcctgccgtgacaatttaaaagtatggctcatttatgacaaagggaaatctatagcttatgtttgggataaaaataagctaactgacaaagaggcaaaacaaaaagctgaattgaaattactattaatgtgagggaaacgatgtaccaaccagaaaaactaaaggctcgtagaaaagagctaaaaatgactcaaaaagatattgcagatcaattgggtattacctaccaagcctattctgcatgggagcgtggagtaaaacaaccatctagagaaaaagtaaagcttttggagcagattctaaatgctccaaaaggctattttacggagatagaaatcgtcaggatatacaatgctttatcagatgaaggaaaagatcaagcacttagttatgttagaagtctagttcaaaaagaacaatgtaagaaagttatttcgatatcagaaaaactatacgaatatcatgtttatgaaaaaatgtctgctggtatcggttcatcagtttataacgatcaaaactatgataccgtctattttaatgaagagctagcccacgatttcgcctcatggatttctggcgactcaatggagcccaaatatcaaaatggctctgtggctctcattcgtgagacaggatttgattatgatggagcagtttatgccgtaatctgcaatagccagacttatattaaacgagtttatcgagaggagcatggcttaaggctggtttctatcaatccaaactataaagatatttttctttcttatgatgaagatcctagaattgtaggaattattgttggtaattttgtaccaatgaaactctaacagtagtttttttacgttgattttctatttctgatgactatgtaataaagaatatagaaatcttttactttgtaaccctatgcgccaaatccttaaatatttagacaaattacaagtgttacaaaaatatttcaaaaacgcttgacattctgtaacattgtaatataatagctaatataaatttaggtgaggtatcataattatgaaaaaatggacaagtttagcacttttaggcttgacttctgcaactctactagtagcttgtggttctaaaaaagaggagaacagttcttctgtaaaagaaacacagacttctatgaaatctagtcagaataaaacaaatcagtcttctaaaaagaaaaatacaaaagcaactgaatctagttcagaagaaacaacacaatcaagtcaaacaaccacagcgtctaatacaacaagtggtgacaaagctacagattcatctcaaatggttcctgtagagctggtagggacttggacaggtacaactgaaattgcgaaagatgtccaaatgacagtggctgcggacggaacggtcactacgacagcaaacttttatcaagcagatgtgaacccaattcgtacagcaacgactagagcaaaagctgttcaagcttctggtaatatctattactgggatacggatgaaccaggggcttttgaggcactccttcctggtattgcgggacttgggggagccaatgccaaggtaaaagccggttttattttagaagagggccattatacaccaattgtatttgtaacaggtctcaatgaagagtttgattacagcaaatacaatgatttccgtgtttcactcacaaaataaagacatattcaacgcccttaaaattgataacaccccaaaagttagatttccatctatactttcagggtgttttcttataacctaatatacataagaaatcaaaacttcatcgctctaattctacttattatattgttgaagtgctttattatatgctttactgcctttttggtaatattcatgttctattccagatatatcgactgtaatggtgccatccttaactttatattttactgttgaatcagctctaccttctcctgataaaaggaaggtgttacattcttgatcaattgtaaaactatcagcttctccgtgttttattgaacctctattcccttttatagtaaatgccaattcatttctttcacttgatatccaatagtattcgccatccagagattgttgcttatttttagtgcaagcaattagcgtaattattgataatgaaagcagtaatatacctattaattttctcataatctttgcctccttctataattttaattataccaaaataatattacaagagtatgtcagtgtctgttataacggaaagatgaagaaatgtctattataacagcaaatattaaacttttgtcgattgattttatttaagattgagacaaagtatagatcaatggctatatataatttaaatattgatggatttgatcttgatacagtagcatatcattgtaaaaattctggctgatgcaggcctcctagatagttatgaacctacatatggtgatgatagaatttatgcttttagtgtaggatcattgacttgggcgggacatgattttctagataaaataagagaaaatactttgtggaataggacaaaagataatgctttgcctatgagtttagaggtaatagtaatcattataaagtgggtaacttcatttttgaatagagattgtcataaaaaatagatagatggctttttccgtctagcataattttataaattggaaattaatcagtagatatggttctgaaaagccttgatattacgctgtttttggcccaactgaaacacacacttttcaaaccaaatgttacgattcgtaagtaaaagaacaaataaaagaagaggagcttcatactaaagttcctcttcttttatatatccgaatcattattcttatttcaaaaaaggtagtgaaaaaggtagtgattcggttgatttctattgcaatgtagtgaaatttagaatttcaaaaatcgctttaaatcaaggtttctaccgtctagtgacgtgtactgaatccctatttcacttctgtaaaagctaacttcaaattctgtactagtatcttctggaacctaaacacaattatcgaaagggtctagatccatcataaactagtgaacccgaggaaacgaatgaataagtacctcacctagttatacaagaaaacggttgttataatgtttttaaagactaatctgaatgctactattattttagtattggaaaatattaagataatgaagctcagtttagttaaaaagaattcaatcactattgtaattgattaggtaattttttattttaagatagagcacatcatttccgtataatttagctagtgtttttgcatcagtgtaatattgtaaaatctcttctttagatagaaatttttcacaagaattagcaacgagaaggagtagagaaggcatttgatatgctgtattattatttttacaaaaatctatggtttctaatgctgtttctaaagcatccagtaattgaccgttaatcgttaaatgatgtgcaaaattatattttaaccggatatatccttctatatcctcttttaattggaaatcttttgttgaatagatttgaagaagttgcttgtaatttttttcatattcctcgttatagcctatatttgagtagaaatttgttagagtattcagagcttttaaataaatattttttttatagtcaagaaaagagtcaatgagatttttaagtaactcaattgcactatctttttgatcatagttgtaaaagagtataatagcttcaatccatgttaaataagattgttcatcctcattaaatgaattttgattgcttttttcaaggttgtaaagatactctaaatcattgtaatttctatgttctaaaagctttgaggacatggcaataaagtttcgtaaatcagagacagtctcatacgactcatcgaaaaagtaatttatatccacctgaagtttttgtgataagttataaagaacatcagcggaaggaaaatagtttgttcgttcgattttactaattagactttgttcgcaaattccatcagccaaatctttttgagatagtcctagtgactttctttttgttttaattttattacctattgattgcatattaaatctcgtttgaatttttatattgaaattgctaaattaattactagaacttattctatctcataacagatatattgtcaaagattaaaattcagttatagtgttatacaaagttaaaattcaaaacaataaccactaagaataagtaatttaaatgttcagttaaatatctcgaatgagatataataaataaaatagcgcgaacaacctaaaataatttgacttataaaaattaatgttatataattcacttgaaagatgtgaaaggggtttcaaaatgaggaaattatttattactttattaggattttcacttttagttaactttggtaacatttatattaatgtttcgaatgtaaatgataatgtatctagtgagatatatttaggtaaaattgtcgaatcagagcgtttaggactaattgatggcaaggcggattctcatgtataatcacattttttacataaatattgatatttttaaaaataatactttatttaatatgagaatttttaagtcgatgtaatggacttataatatacctggaattgtttaaaactgttgcttcagatcaagggttattatattgatagatttttaagtgaggttaaaaatgcatgattatatagttagtagtgcacaaacaattagagaaaagtctaagttttttaacgaaaatattgaaattgattacacatttcttaaggaatggagaaatgtgagaacactaatgacagacgagttgtttgaacttatgttaaaggaagaggggtatactttggaagaatttgcaaattctttacgagaaagtaacgaatttgccgataatccagaatggtatgataagtttttatttattatacaaaattatgattataacaatattaattatgaggctggaataagtgtattaaccctgccgttcagtaaatatactttagataatattaagagtaaaattagtaatttagataattttagggttgatgaagaaatattcgataagataattttatatcagaatgatgagctgttcaatttgattggtaaaattatggccttgaagttagctgaatataaaaaggaaaataatttttctaatagaaatggcgtgtttgaaaagtttttggaagataagttctattctaaagagtcgtttattcagttttttgaagaataccctgttactgctagattattaacagttcggactcaattttttatagacaatattagcaatttttttaataacctcaataatgacacctatgatttaaaaaatttttttaatttatcagaagtagtgataactgacctagaactagcagctggagattctcatgaaaatggtaaatcagtaatcattttttaagtgaatcatattcagaaaattgtatataaacctaaaaatttaaaaattgaagaaagaatatcggaattattaaaatggtttagcagtgaagagctcttagatctgcatcttccaaaaggactatacaggaacaattacacttataatgagttcgtgtatagaaaaccgtgtaattgtattgaagaggtacaaaggttttatatacggtttggttatttaatagcgttgtgttatttattggggattgatgatctccacttggaaaacgttgtagcaagcagtgaatatccaatagtaattgatattgaaacagcgtttcatttatcatctaaaataaccccggacgatatttttaataatattttacaagagctggagcatgattctataaaaggttcgtgtttattaccacgaaaaattccagttggaatggatggggcaattgaattaagtgcactaattggtaaggggggtgaaactagtagtacagtatcaaccccgataaatattaatagcgatgattttagatattcggaaaaaaatgtatatttttcgtcaggtaacaatattccgatatataaaggacaagaagtagattcgaaagattatagatttaagataatagaaggctttgaagatttttttgattttgttttaaagaataaaatagaactacttagaagagttgaacaatttaaaaatataaaagttagaatattgcttaaaggtactgagaagtatgcgagtatgcttagatattcaagtcatcctaattatgggaagaggatgaaatatagagagagactatttatgaatatttgggcgtatccatatttggataagagagttgttaagagtgaagtccgtgatttattgttcggagatataccgatattttataataatataggttctaaagatttaatagatagtcaaggaaatatataccagaattacttcctagagtctgggttagataagtataagaaactaatagctagtttgtcacaggatattgtggataaacaaaaggatattctatttatggagcttggtttatatgatgaatatttaagttttagaaaagaaaaaacgaatagaaagatccaaaactatagcattaattacattcgcgaggctaagcaaattgctaaatatttgatggataatacaaaaaagtatgaagagatgatatccatggtaaatcttgatagtgatagagaatatcattggagttttcaaccaatgaatgaaagtttttatggtggattaagtgggatagctctattctttttggaactatataacgtgactaaggaacctatctatttccattattataaggggtatataagttctgcaatcctacaaactcgtaatacaacatttcaaagcccattttttggttggctttccccaatgttcccgctccttctagagtataaatataattctacacttgtagatgaaaaatattttagatttacaattgataaactaaatactctaacctcagaggatgtatataaaatagaaaagattgattatatttctggaatttcgggcgtgattaccttgttgcatcagattaatctagtctatccattaaaaatatcgtctactacaataggaatgttttatcaagtactcatggaacgatcaaaaggagataaggagttaaaaagtaaacctggattagcgcatgggattgctggtttggctatttctagatctttagatcaaggtttagaggagtttgcttataattattctagtttagaagtagataatttacctaaattatctgatcgatataagtggtgtttgggtttagcaggtatcattcaagcaaaattgtcaatgtactataatgcttcatcttatattaatatcaaggatttatatgtattatttaaagaatttgaacatagtttaatggtaagttcgattgatgatgatagtttgtgtcatggttcagccggagtgattattactttatcattagtttataaattcactggtgaaaaaaaatggaatgatatgttgaaaaaccaactctataaattaaaattgaattctttatttgattcctatctgcttcctagggttggaaaaacttattctcttggactatttgatggaattgcaggaatagggtggatgtatttgtttttagaaaataaatgttctaatataatgatgctcggattctaaatatgtttacagcatataaaaggagatggttaagatggtttaattatataaactttgactgtgacatgtgttttctaaaaaatggaaaggattaacaatgttagatgttcaagattcaattgtaactggggcagcatttgaggatatgtcaattgctgaaatgactcgagtgcaagggagtggggatatttctcctgagacgactccagcttgtgtgttaataattagtaatgttatatcaggtgcggcagtaagttttaatttttcagtaaatgttgtgaaaacccttaaagggaagtgttaggaggagaagatgataaatgaaattgatgtaaataagtacgctggtgattcctttgaagaaatgagtatagcagagatgactttggttcaaggttctggagatatgagcgcagaacttactcctactacaccggcctgtttcgctagtattatctatacagctagagcttcttcagcaagttgcgctaatgcaataagtgcaatttcaagtgcaatttcaggtgcaataatttcagctgtaaaatgttaatattaattattttaaattagggacaggttcaatattgggttaaagaagtactttgaacctgtttctcttttttataaatataatagtagtattgtgattattatgataaacactataaccatattttaaagaaaaagttgaataactagaattaattgttaatatggtaaaacattttagattataaaaaatatataaggtttacttagtttcaatctgttgtgttcctataaactgactattagagtatagatagagatttttttggttatagatatttactttattgaagctagttaagatgtatcacaagaatataacttaaatagaagggatgtatattgtgaaaaaaatttttatacttataggtagcaggaggaaaaaaggtaatacatacaggtttgtaaaatcaattatcagcaatcttagtgattttgatgtagattactgttttccacaagatttagatattcaaccatgtgttggttgccataattgttttcaacaggctaaatgtgttttaagagatgatatttcgctattagaagataaaattctatcatccgatatttttatcattgcttctcccgtttacttacactatatgacaggagatttaaaaaggatattagatcgattatcctggtgggcccatacgatgagattgcaagggaaacctgtagtagtgttaagtacgaatggttcaaacggtgaaaggtcggttacagaacccctaagtgagataatgactgcgatgggagggaatgtaattgcaaatgcgaatgcttctgaatttccaaatcagattaataataatttgtggctttctgaggtatctattgaaatttctgagcgaataaaacaatattctcgtcaacgacctagctcaaatcaatttttagaaacagcatttatctctgaaaaatttaatattctacaacaaaaagaaatggccgttcgttttcctgactgggagtttaacgaattgaagttttgggaagatacaggaatgttaagttttgattcatatagtgattatttatcacatagattaaagtgaggagttaacattgaagattaggtttcaacaacagagtgaacattctgagtgcggtcttgcatgtgtagcaatgttgattgattacttttcagaaaatatgagactaactcatttgagacagaagtatggtgtcccaaatggtggatataattttgctcaattaaccttaatatttagtgattataacattagtacaagatgtattcatgtggactatgacagaattaggagtgttcctacaccttgtattgcattttggaaggaaagccattttgtgattattgaaagggttgacaggaagaaatattatattgttgatccggcattaggcaggttctgtttgaacgaagaagaatttaaggaatgcttttcgaaagcaattttatacatagacagaaaatactcaaaaaaaagaaacacctttggaatttttaattactattttaaaaacttgctcaaacattttaaaattgttttttctgttttagttatttcattcagtgttcagctattggcactatcaattccgtatattatccggtcaataatagatgatccgatgatgtggaaagcacttgatcattcaattctaggtttaactttaataataataagttttctatattttggaactaattatattaaaattaagttaatagctaaacttcaaacaacaattgatagagatttggtaacgacagttgttaaacatttattggacttaccatattcatattttactaatcgtaataaaggagatttagtttatactttaaactcaaatagttatattcgacaaatacttattgaccaagttattgaactaattattaattttgtttttgcattattatatttgattgcaatgtttttaataaatactacattaacctttgtaaccttgattatagtggtattaataagtggatcactgtttataaattctttttataataaaaaattgactcagaatgaaataactgcattatctaattctcagaataatataaatgaaatgattaacaatatattaactataaaatcaacggcttcaaaagataagatatttaaaaactgggtaaataattttgaagaacaactttactatgaggttaagcgtgccaattatagttccatttttattaacttttcacatagtgttcaagtattatatactttgataatttatattgtaggaattcaactgaatcaagcaggagtggaattaacacttgggagtattgtaggatttgtttcaattggagtatcatttatttctccattgatttcgattttgtcctcatataatcaaattttttcaattagtatttatgtgaatagattattggatgttttggaaacgccaatagaggcattattatttggtgattatagagttgagaatttatctggcttaattgaaattaataatcttagctttcgatatagtaaattttcatcagatgttttggataatatctcgtttaatattcaagaaggtgagaagatcgctattataggagagagtggttctggaaaatcaactttattaaaattattatctggattttataaacctagtagcggtgaaatcctttttgataaacacccaatagataaattcgatattgaaagttttagggaaaaaattggagttgttttacaggaggatcgattatttagtggtacgcttagggaaaatataactttaggaagaccgatctcagataaagaaatttgggatatcatgttaggatctggtctaatcgatttggtaaatagctttccattaggactggataccattatatcggaaaatggaaataatctgtctggaggacaaagacaaaaaatatctctaataagaacacttatttcaaaaccatcaataatatttcttgatgaaccaacgagttctatggatgtattgtctgaaaaacaaatgatggagttgattttcaaaataaattgtacagttgtggttgtttcgcacagaatctctttagttgataagtttgacaaaatattaattgttaaaaatggaaaaatcgaaggctttgattcacacagtagattaattaagaattgcccttattacaacagcctctattataaaataaaggagcttgaaaatgaaaaatgatagaagtacatatcttactaaaaaatttatagtattaatggcagtaacatgttttagtatttttccatctgttatgatttttgggaaaataggatttataatttatgcaatcttattcttttggactgtaaagacgtcgctcgagattgagaaaattaaaaagcaaaacaacttaaatactgtatcggatttattaaaggataaaactaccgaagagtataaaatgatagaatcagatgaaagggtaaaaaactttataagtagtttaagtcaaacaaaaataatattatatacggtcattgttggggtaataataacactgttttcggttcttatttattatcttattatggagattgtttaggtttgacgttataaatttataaatttcatcgtagaggggaatggaaaatgaaattattatttcgcttagttatattatcagtatgttttctttgcgttggaaaagtatatgctgaaaatgttagtaatctttcttatatgattacgaatagagaagtttggaaaatttcagaaattaaaagaaaaatagattcaaataaaatatcatatattcctgaaattaatcttttaagttttcataatttagataatgaggatcagaatataatctccaaatatttcgatttaaaaaaaggcaattctcttccaaaaatagatatacaaaaagaaattgaggtcgatactatttctaatagtcaaactgaatcaatccataatgattcagtaagtaattcaatatatggaaaaacagatattctctcagaggaatacaatagttttaattggccatataagaaaattttatcagatagaatattaaatggggatatacgaggagagggaattaaagttggaataattgattcgggtgttgattttagccaccctaatctagtagacaataatcttaaacaaaagaattacgtaaatgatgatcagacagatgagttgggtcacgggactcaagtggctggtgtgatagatactctagctcctggagtagaaatgacatcttacaaagttatgggagccgaggagggggagtctctaaatgttattagagctataattgatgctaccaatgatggtatggatataattaatattagtctaggatcttataagaattatacgaagggggaggaaaaatttacaactattgcatttttaaaagcaattgaatatgcccgaaggaacaaaacaattattgtagcttcggcaggaaatgaatcaattaatcttgatactttcagtaacaataacatgcatgttcctggtggtcttccttcagttattactgtagcgtctactaataagaagggtaataaagcagattactcaaactatggttctataattagtatctcaagccctacaggaagttttggagaacaatatgcgacaacaggtcaaattgatgcccgtgaaatgatgatgacttactatccattgacaaaagaatctataattggttctttagctggatttccaaaagggtatactctttcctttgggacaagtttggcagcccctgctgtgagtgctgctgttgcagttattctgtctaaaaatatttgtcaagacagagatgttgagagcatcatattacaattaatgaggaattccgagctatttaaggaagactctgagaatattggctatggtgagttaagaattaaatgaaaaaaattcattgtatcaatgaacggcaccctaaaagttagacagaaaaaatcaaacttttggggtgcttttattatgaaattaacttatgaagataaagttcaaatatatgaattgagaaagcaaggagagagctttagacgtctttctaatcaatttgggataaacatttctaatcttcagtacatgattaaattgattgatcgttatggaatagaaatcgcaaaaaagtaaagaatcgttattgttttcctaaattaaaaatagaaagtggacaagataataacttaatcagaaaatattggtatataggttcaaaatagcgttactatgcagtgaatgctatttttttgaacttaaaaaggttataatagttctaactataatcactaaggagcctttagttaagtactgacatacttaaacaatcctataggtctcttggcatactggtgagctggacgctattcagcttaaattttataatcatagtaaccaaaagtcagacattgattccttcctcggtgaacttggtcaatagtctacgaagtttgaagtggaggagtagttttggagatattacatgacttaattgttaatctagttgttgcagttattactttttttgtctcgacaatatttaataatagacgtagaattaaaatatggtctcagtctcttattcgatggaacaaagatataagattgagttgtgcttacctatttcaaattaaacagactaatggccgctatttgctgataaaagggagaagaatagaccaatatcaacctataggaggtgtttataaatatcacgattccttcaaagggctaaaagaagaattcgagttgaaagatgaatctgagactcgattttatgaaagtggagatctaagattaataacaaaagggaagcaccttgtacagtttattaactggtttgatacgagaaaaaatagggaagtaactgtaattagagagcttattgaagaattagaacctgctggaatttctatagaggacctagtaacaaagtcgcaagttgaatatcttaaaactgtcaaagaaccaatcatgttttcaacttactttcaaatggatgaattaaaaatatttgacatttttgaagcaagaatacctacagaaatattagacaaagtattagaaaatgatgattattgtctaatagaggctgaggatatagaaaaaaattgttttgctaaagacggactttctaaaaagatttcggcaacctcgaagtatattgtttagggggaagatactttgacagatattactatctcaagagagattaaatcaattattgaagaattggatgtttcgtattcgaaatatgaactagctactaatagatacaattctattgctaactatatcaaaaattcagaacttagcaaaaacagcccagatatatacttgcaaggatcgtttaaattgggaacagccatcaagccattaacagaagatggagcttttgatattgatatagtttgcaacttcacaaagttaagaagaaacgaccaatctcaatattctttgaaaaataatcttggggaaattgttaagagttacgctaaggctcagtcaatgtccagtgggccagaggaaagcaaacgctgctggacattaaaatatgttgatgaaagcaattttcatatagacatactgccgtcagtccctttaaacgaaaaaaatgatgggtttatagcaattacggataaaactcatgaaaactattttaaaattacttctaattgggagacaagtaacccaaaagagtacgctaagtggtttagagatctttcaaagttctctatctatcaaaaagaagttgctaaaagattttatgcatctattgaaaaagttcctgaatatagagttagaactcccttgcaaaggattgttcaaatcttgaagagacatgctgaggtttgttttgaaaaagatattgaatataaaccaagctctataatcatcacgacattagcagcaaagcaatatcagtctgccagtacaatttatagtgattttttagatattataaactatgttattgaacacttgaaggatgctattgaatttagaaatggaaaaccttgtgtatataatcctgtaaataaggacgaagttctatctaataaatgggataaagatagtagctattttgaagcatttgaaaaatggttggaacaacttaaattagactttaatgtagcaaattataatttatcttatttagataaaataaaatttataaggactagcttatttaagaatagtggagaacaattcccaattgttaatgtcaattctataagtcatcatcaaaattcaaaatggaaagagtttttgatagaagatgtatcaataaaggcaagttatctatataaaggatttaggtggaaaaagattgaaagcggaacaaaattgaataaacatggtagtcttaaatttgaagtacaggctaatagtatactagggtatgaaatttggtggcaagtgacaaatacaggcagggaagctgaattagcaaattctttacgaggcgggttttacaattctgagttagtagaaggtaaaagagttagaaaagaaagtactctttacactggtagacattatgtagaagcatatctagtcaagaatggaatttgttatgggaaaagtattccgtttgagattattataaccgataaattttcaatagattttgcacattgacggagattaaccggtaagttgtttatttgatatttcccttccttcaatcaaactcattctaaatttttgaatgaaaaagatgtcggactttgttgataattgagataaagctaatctaaaattacttgaaacccagacttgtgaaatcaggtcttacgatttgtaagtaaaagaacaaataaaagaagaggaacttcacactaaagttcctcttcttttaaatatccgaatcattatttttatttcaaaaaaggtagtgaaaaaggtagtgattcggttgatttatattgcaatgtagtgaaatttagaatttcaaaaatcgctttaaatcaaggtttctcacatctattgacgtgtagtgaatccctatttcacctctgtaattatcaagtattacaatctatatttcttttaatattttaccaaataattcttctagcttccctaagtctccatagacagttccgtccatataaaggttgtaaacttcatcatcttgttccactcgtatttgtgcagaatatccttttgatagtgctaaggaacgaataacttctcgttgagttcgtccatttccttctcgaaagggatggaaataattaagattatcaagaatttttgctaaatgtttaatgatttcatcttttgagttggcagtttgatgataggaatgaatgagatgatttatataagtttcagcagcattaaacgactgtatcgacataaaaggattaccacttttagaaatattcaccttgcgatattgtcctgaccaggcataaacatcctgaaacaaatagttatgaatggctaaaatattactcatggaatagacttcaatggctttcaagcgcaagtctgcaagtcttttagtaacgaataagtgttcatttcgataggcttcttcaatatttgtaacattttgtttattgattaagactgtggaatttggataggtatattggtgattggggtcaatgtactcatagccttcgtattgatttttaaccaatattcaattcctttcgtctgttgataacataagtttttaagtcaatcacatcttgaacagtaggttcataattttcaatcattgatgacccaatagcataccagacagtatcaaaatctgaaaagttatcaaagggaatccctaaaattgttaattcttctttatttacatcaagagtcatggcacacctccttgtatagagttatccttattataccataaaatcggtattttcacctaaaggatagagaccaaaagatatatgtaagcgtatagattaatacttacagaactaaaaatattcccctgtttttagtccaactgaaacccatactttccaaaccaggttttacgaaaagttttatttgtaccaaatttgtaccaaattgaattttagtctatttgtatatgaaatctaatttagttaaattagctttaaattcggtatattattgttgagtttagttcgtccaaacaactagaatgcttgcaatcggcatcagatgatacattgaaaagcctgttgtgacgggctttttttgatgttgaatcactttttgtaccaatgaaactctaacagtagttttcgtacgttgattttctatttctgatgactatgtaataaagaatatagaaatcttttacttggtgacccaatgcgccaccctttaaaaatttagataaattacaaatgttacaaaaatatttcaaaaacacttgacaatctgtaacattgtaatataatagctaatataaatttaggtgaggtatcataattatgaaaaaatggacaagtttagcacttttaggcttaacttctgcaactctactagtagcttgtggttctaaaaaagaggagaacagttcttctgtaaaagaaacacagacttctatgaaatctggtcagaaaaaaacaaatcagtcttctaaaaagaaaaatacaaaagaaactgaatctagttcagaagaaacaacacaatcaagtcaaacaaccacagcgtctaatacaacaagtggtgacaaagctacagattcatcccaaatggttcctgcagagctggtagggacttggacaggtacaactgaaattgcgaaagatgtccaaatgacagtggctgcagacggaacggtcactacgacagcaaacttttatcaagcagatgtgaacccaattcgtacagcaacgactagagcaaaagctgttcaagcttctggtaatatctattactgggaaacagacgaacctggagcttttgatgccctccttcctggtattgctggacttgggggggccaatgccaaggtaaaagccggtttcattttggaagagggccattatacaccaattgtatttgtaacaggtctcaatgaagagtttgattacagcaaatacaatgatttccgtgtctcactcacaaaataaagacatattcaacgctcttaaaattgacaacaccccaaaagttagatttttctatctatctttcagggtgttttcttatagccaaattgggaaagaaatcaaaaggttttagctctgtttctacatttttatttctttgtaaagtcatttaattaatttagctaaaaaggtttgtccaagttctcggttgctcacttaattagctcttttacttcttagatacgacctcttagtagggaaaaggtgccacttactgaaaagcccttgttttgttttcaacagctgttataatggtactatcaaaacgttgggaaaggagttttatgaaagttaaaatcgaattggatccatctatggacgagcctgagatcttgattcgagctccgcgcttgaccccggagttgacccagctgcaagagagaatcctggaacaaaaggtcgcttctttagccttctacaaggatcgaagtgagtattttcttgatgttgcatcgatcctcttttttgagacggatggggagaagatttttgggcacaccaaggacgaggcctatgaggtcaagcagaagctctatgagttggaggagctgcttcccatcgccttttgtaggatatccaaatccaccattgtcaacgcaaagcagatctattctctagaaaagtctttttcagggaccagcacggtcaatttctaccagacccataagcaggttcacgtatctagacgctactatcaactcttaaaagaacgactaaatgaaatgaggtaatatcatgagaaaaaaattaattggagtattcttaattcttttagcagccttaatcctcttacaaggctattttgtaaaatgggacatcagcatctggaccttggcttgggttaccttgcttgcagtcctgtccctctctagtttcttaaaacgccattttggttggggcttcatctatggacttttagctctcttttgtctcaatgggcaataccatttccttccagtgtccaattcagttgtcatcctctcctcaattctcgctgtgattgggctcaacattttgtttaaaccctctaagaaaacaaaagcccgcctagcttcctattctgctgggtccatgagtaagtcggatggcaatgacatcgatgtcactttttcaacagtgacaaagtatctcaatgaccaacactttactcacggaagtgcagatgtgagtatgggagaagcttcggtttattttgacaattgccgtatcgaaggtccttctgctcagtttgttgtcgatgtttcccttggaagtttgagtctctatgtaccaagcgattggcgtgtccatgtaaatgtggataattccctctcagcgatccagcaccaggaaaatccaagtgctctgacaagtaaggatttctacattacgggcgatgtttccttgggaaatctagaaattatctatgtaggagcgaattcgttttcttaagtcggaaatgaaaaactttggccaaaagcttgccaagagagattttttttggtaatatagtacggtatgtggtgctagcacatccgttatattagatctaataggaggaaacacagaaatggctaaagtatgttatttcacaggtcgtaagactgtatcaggtaacaaccgttcacacgctatgaaccaaacaaaacgtgccgtaaaaccaaaccttcaaaaagtaactgtccttatcgatggtaaacctaaaaaagtttgggcttcagctcgtgcattgaaatctggtaaagtagaacgcgtttaataaagaaagaaggctggacaaaaatgtccagccttctcttttttgataggatagttgcatgacgcagtggttgattgttcaaagcactgctttgaggtggtggataggacttgcgaagcaagtttcttaagactttggagttcaaaagtccaaagatggtctaatgagggaaacaatgtttcctttatctgcaaccttcagcactctcccagactttgaagctattcggggtgggaagattgaagaggttgtgggggaccttttcaacctttttttattttacggagttctttcccactcctttttcttcagagacagctgtcacagcgggagaagaatagtccctacccttttacagttgacctcttttatggtaaaatagaatataaaatacttttgaggtagaaattatgacagtaaaaatcaatacaaaggacggtcaaattgaattgactgatgaggttatcgcaactgttgtaggcggtgccgctactgagatcttcggtgtggttggaatggccagcaaaaatgcgatcaaagataatttccaagccctcctagggaaagaaaacttctctaaaggtgttgttgtcaaaacaacggaagcaggaactatcgcagttgatgtttacactgttttgagctatggaacaaagattagcgaagtctcaaaaaatattcaagaacgtgtgaaatttagtttggaaaatcaacttggaatcactacggatactgtgaatgtctatattcaaaatatcaaaattgtgggagaataatcgtgtctaatattactacaagtttatttcaagaaatggtccaagcgggggctacgcgcttaaataaacaagcggaatatgtaaactctttaaacgtctttcctgtaccagatggggatacagggaccaatatggggatgaccattgaaaatggagccaaagaagtatctgaccgtactgcttcaactgttggagaagcagcagggatctttgccaaaggactattgatgggtgcgcgtgggaactcaggagtcatcacttctcaattgttccgcggattttctcaaagtgtcaaagacaaagaagaattggatggagcagcgcttgcagcagccttccaatctggagtagaagttgcttataaggccgttatgaagccagttgaaggaaccattttgacggtttctcgtggggcagccatcggggctaagaaaaaagcagaatctaccaacgatgcagtggaagtgatgcgtgcagctcttgaaggagctaaaacagctcttgcgaagactccagatatgttgccagtcttgaaagaagttggcgtggtagactctggtggtcaagggttggtcttcatctatgaaggattcttgtcagccttgacaggtgaattcattgcttctgaagagttccaagcaacacctgcaactatgtcagaaatgatcaatgcagaacaccacaagtccgtcgctggccatgtcgcaactgaagatatcaagtttggttactgtacagaaatcatggtcgcattgaaacaaggtccaacctatgtcaaagacttcgattacgatgaattccgtaactatttgaacaaccttggggattccctgttggtggtgaatgacgatgagattgtcaaagttcacgtccatacagaagatccaggtcttgtcatgcaagaaggtcttaagtacggaagcttggtgaaggtcaaagtcgacaacatgcgtaaccaacacgaagcgcaagttgaaaaagaagagcgccaagctaaaccggttgaagaaaaagaatatgccatcatcgcagtagttgctggtgacggattggctgatatctttaaagcgcaaggagttgattacatcatctctggtggtcaaaccatgaacccatcaactgaagactttgtcaaagcagttgaagagttgaatgcgcgcaacattattatcttgccaaacaacaaaaatatcttgatggctgctcaatctgcagcagaagtgattgatcaacctgcagcagttgttgagaccaagaccatccctcaaggattgactagtcttcttgcctttgatgaaagcaagtcgatcgaagaaaactacgaacgcatgagcgcttcattgggcgatgttgtgtctggtagtgtgacaacagcggttcgcgataccactattgatgggcttgaaatccatgaaaatgataatcttggaatggtcgatggcaaaatcgttgtttcaaatccagatatgatggaaaccttggaagaaacattcgctcatatgttggatgaagacagtgaaattgtgaccatctatgtcggtgaagacggcagtgaggagttggcaaatgaattggcccaagcccttgctgagaagtatgaggatgtagaagtggaaatccaccaaggtggccaaccagtctacccatacttgtttagtgtagaatagttgaacagaagaggctgggacaaaagtcctagcctctcaattatttttggattgtcgagcaagacgcagtggttgagtgggctctactacgctgatttcatcagcttttacagccctactcaactgtgcggaggtgggacgacgaaatcgaattctaacgaattaccgatttctgtcccactctcttttttcgtgctaagaaaaactagatagtatttccaagaagcttattagattttgtattttgaaagcgaagcgagtatttactaggacaagaatagggagtatcaaatagtctcaacgaaggttttatttccaaataaagagcttgaaatggctgggaaatggtttgagtggtggagtttttagacaagaaagacgcgatatgttatactggtatcagtatgtgaaaggagagttataaaaatgaagaaattttttgtaacccttgggctagccattttggtattgactggttgttcgcaatcccaaacaaagaaaactacaaccactagctcatctagcagttcctctgttaaaaaagaaacaaaaactgaagaaaaaacaacagtattagttgggaatatcaatggtgctaaacaccgagatgttatccaatctaaaggggataaggttgaaagtcttcgtatcgaagtgacagctgatttgccccaacaacttagtacaatttctgcagaaaaatcacctgaagagctcacagcagctattcaagctttgctggagcaagatgaagactataagaagctaaaaactgttcccggttttagtttggaatacacagtcaccccagaaaagaaattgctctcaaccagtgtgattgacctcaaccaaattgatgccaagtctctagaagaaatttcttacttcaaagatgctggtctcaatgatttgaaaaatatgaaggctgatgccttgatcaaagctttgaaattacacggtatgaaaatcgaagaaggtcagtaagaagaatagaaaaagtcgagtgaagtcacttggctttttttagtgacttttgtcatgtaagcgagtgacaaaatcatctagttgcctcttcttccttttcatataataaagttagaaagtaagagggttgaaaatgaaacaatggatctataaagtatttacgttaacagtggttggaatggtcgtctatttggtcttttcaaaggatgatagcctctattaccattttccttgggaattatttgctgggcttggcatgatgagctgggtggtacaggaagttttgaaaatggtcaaggcggtaaaaaaggaaatggagcaatgaaaaaactagaaattggattggtttttgctttgtgcctggttttgtggataacagagatgatgacgggctggttttctgcccattttgctagctggtgtttccaaacggttttgggagtgaccttggttgtttttgtcatcattcctgctagccaagcctgcttgaaaggagagtatcatgagtgtcattagagtagagaacttgaaaaaaagtatcaaaggaaaagtaattttagaagatctttcttttgtggttgaacggggggattgtctggccttgattggcccaaacggagctgggaaaacaaccttgatgaactgccttctaggagatatgaaggtgacttctgggatcgttgaagtagaggggaaggcacctggtcatcctcagttaaaggctagtgtatcctatctccctcaagagaatgccatcgttcaaaagttaactgtacaggaactgatcaacttctttcgctctatttatcctaaacccttaacaggggaagaaatcgatgatttattacgttttagcttggaacaaaagaagcaattggctagtaagttgtctggtggtcaaaagcgcctcttatcctttgttctaaccttgattggtcgtcctaacttacttttcttagatgagccaactgcgggaatggatacgtccactcgccaacgcttctgggagattgttgggcatttaaaggaagaaggtgtaaccattgtctattcttcgcattacatcgaggaagtagagcacacggccgatcgaattttggtcttgcatcagggacatttgcttcgggatacgacgccactagctatgagaagcgaagaggtagaaaaacatttcacattgcctttgcgctatcaagctctagtggcagagatggaaggcgttggtgaagtggttgttaaacccgatgcccttcaggttgtgacacgcgatgccaatcgtttgtggaggcgattgcaagaagaaggatgttcgatccaagaaatcgaagtaaccaatcgaagtttattggattctatttttgaaaatacaaaggaagtaggtagagaagatgaaacgcatgaaagctctcggcgtggttgagtggcatttgaccagtcgccaagccatttattacttgttatcaattgggatgcccacggccttttatctcttcttttcaggtatgtaccaggatacaccaggggatttcatgagggattatcttttgtccatgacggctttttccatgatgtctacggctctattttcttttccaacggttcttgagaccgatcgactcaataattggcaaaaagtcttgcgccatacccccgtatctatggtagaatattatctaataaaggttgtgggtctctttgtcgattttctcctatcgattgtagttgtctttaccgtgggacatgtggtgcggcatgtgaatatgcccctgcaggattgggtcttagcagccttccttctcatcttaggaagtctagcttttgtagcgattggtctggtcttgaccttgcttccttctagtcaattgatgtcggtcgcgggcaatctcctttacatgggactggctgtcatgggtggactatggatgcccattagtctctttccagaatggatgcaagccattggcaaatgcctaccaacctatcaattgatggaactgatcaagacctttttaaataagggacaggttaatgtctttgcgagtgtctatttaaccttgtttatcctggtcttgtttgcccttgttatcatctatcgtcgtcattctgaggttcgttcatgattgaaaaactcaaacatattcaccatatgttttacgtaggcttaatttttatggcctttccctttgcttctattttcttagggcagattccctggtggcatttctttttagccatcttctttatgataagctatctaggaatcctcattactgaaaataagaaactgacctggcttttttggatttatcttctactttatattgcaggaaataccttttttgttggaactagcttttgttggttttactattatctgagcaatattttgctctatcgtttagggattcgcgattttcgctcgccctttctttggacggctgttggatcactactgatcctttttggagccctgttatttaatagggagatgagagaaaatgattggctttttgtactgattatttgtttgttcatcgcgattatgacctatagtatgacccgggctgagatgatggaagaattgaaagctgaccatgccaagcaaaatgcccaaatcaatcttttgctggcagaaaacgagcgccatcggattggccgtgatctgcatgacagcctgggacacacctttgccatgctcagtgtcaaggcagacctagctgatcaattcttggcattgggtcaggttgagaaggcccaggaacaggtgcaagagattcaagccatcagtcaagagtccatgcaccaagtccgagagattgtcgagaacttgaagcagcgaaccctggcaagagagctagaaaccgtcaagcaaatgctcgaagtggctcaaatcaaagtggagattcaaaacgagcttgatacagctagtatctcgccaattttagagtctgctctggccatggtgtctctggaattagctaccaatatgatcaaacacgctaaagcgacgcaagctcttctctcttatcgctccaccgagacaggtgtggaaatggtcgcagaagataatggcatcggctttgacaaagtctctgacgaagatctgcactcgattcgcgaaaggattgccttgttgggaggagagctggagatcagtcatcaacacaagccgacccggatagaaatacggatcccctatcaagaaaggaaataagatgcgcttattagttgctgaagaccaaagtatgttgcgcgatgctctctgccagctcttgctcctgcaagaggatgtggaagatgtcttgcaggcaggcgatgggcaagaggccattcgcttactcgaaacacatccagtcgatattgcgattttagatatcgaaatgcccattaaaactgggttagaagtgttggaatgggctaaacgtcaacaaccccagctcaaggtcgtcatcgttaccacctttaagcgaccgggctatttcgagcgggccctcaaggctggagtcgatgcctatgtcttaaaagaacgccgcattacggatttgatggcgactcttcatgcagtattagcagggcaaaaagaatattctcctgaattaatggaagggattttaacccatcccaatcctctaagccctcaagaaaaggcagttttaaaagaagtcgcgaaaggggcttctaaccaagaaattgctgatcgcttattcctctcaaacggaaccatccgcaattatatgtcagccattctgaccaagttggatgcggaaaaccggaccgaggcggcaaagatcgcccaagaaaagggttggatataaggaagaaaagtttctaggatttcctagagacttttttttctgatagacgtagcatttttagaaaaactctcattattcggatttgaatagaaaattcagaaaatttactatttttccttgaaatattttctaaaaatggtatgatagtagcatgctaatttgatatacaaagtactggaaaggagagacatggagaaaattaccttagaaactgcaaaaaccggttcagagctcgttcttgaaaccctgcgtgatttgggcattgacacgatttttggttatcctggtggagcggttttgcctttatacgatgccatctatagctttgagggtatccagcatatcttgggtcgtcatgaacaaggatgcttgcatgaggctgaaggctacgctaaatcaactggaaagctgggtgtcgcagtcgtcactagtggaccgggggcgaccaatgccattacagggattgcagatgccatgagcgatagtgttcccctactagtcttcactggtcaagtcaatcgtgcggggatcgggaaagacgctttccaagaagcggatattgtgggaattaccatgcccatcaccaagtacaactatcaagtacgtgagacggcagatattccgcgaattatcaccgaagctgtccatattgcgacgaccggccgtcctggtccggtggtaattgaccttccaaaggatgtgtctgctttagagacagatttcatctatgaaccaagtgtgaagcttccaagctaccagccaaccattgaacctaatgaattgcagatcaaaaagattttgaagcaattgagtaaggctaaaaaaccagttcttcttgctggtggtggagtgagttacgctggagctgcaaaagagttgattgctctagcagagcgctatcagattccagtagtgactagtctgttaggtcaaggaacgattgcgaccagtcatcctcttttcctagggatgggaggaatgcacggatccttcgcggccaatatcgctatgacagagacggatttcatgatcagtgttggttgtcgatttgacgaccgtttgacagggaatccaaagactttcgctaaaaatgctaaggttgcccatatcgacattgatcctgcagagattgggaagatcattgctgtcgacattcctgttgttggcgatgcgaagaaggccttgcagcagttgctagcagagccaacggttcataacaacacagaaaaatggatcgaaaaggtgacccaagataagaaccgggttcgttcatacgacaagaaagaacgggttgtgcagccacaagctgtgattgaacgcatcggagagttgaccaagggggacgctattgtcgtcacagacgttggacaacaccaaatgtgggcagctcaatactatccttaccaaaatgagcgccaattggtaacatctggtggactaggaacgatgggattcggtgttcctgcagctatcggagcgaaaattgccaatccagataaagaagttgttctctttgtcggagatggtggtttccaaatgaccaaccaagaattggcgatcttaaatatttataaggttccgatcaaggttgttatgctcaacaaccactcgcttgggatggtccgccaatggcaagaagccttctatgatggtcggacatcagagtcagtctttgatagccttccagatttccaattgatggcgcaagcttacgggatcaagaattataaatttgataatcctgaaaccctagagaaggatttggaagtcatcacagaagatgtaccaatgttcatcgaagtagacatttctcggaaagagcatgtcttaccgatggtaccagctggtaagagtaatcatgagatgttgggggtgaagtttaatgcgtagaatgttaacagccaaacttcaaaaccgctcaggtgttctgaaccgctttacaggagtcttgtcgagacgtcaggtcaatatcgaaagtatctctgttggcgcaacagaaaaccctaatgtatcgcggattaccattatcattgatgttgcttcgcatgatgaagtagagcaaatcatcaaacaactcaaccgccagattgatgtgattcgcattcgtgatatcacagataaaccacacttggagcgcgaagtgatcctggtaaaagtttctgcacctgctgagaagcgagcagaaatcttggccattattcaacctttccgtgcgaccgtggtcgatgtggctccaagctctatcaccgttcaaatgacgggaaatgcagaaaagagcgaagcccttattcgggttattcgtccgtatgggattaaaaacatcgctcgcaccggtgcaactggatttactcgagattaattctcgccttaacattgttaactccgccttaaaagggcaaataataaaatagaaaagagattttacttatggcagttcaaatggaatacgaaaaagacgttaaagtaccagcacttgatggtaaaaaaatcgccgttatcggttatggttcacaaggtcatgctcacgcacaaaacttgcgtgattcaggtcatgatgtcatcatcggtgtgcgtcctggtaaatcattcgataaagcaaaagaagatggatttgaagcttacccagttgcagaagcaactaaattggctgatatcatcatgatcttggcaccagacgaaatccaaaaagatatctacaaagatgaaattgctccaaacttgagcgctggtaaagctcttggttttgcccatggtttcaatatccactttggttacatcaaagctcctgaagacgtagatgtcttcatggttgcaccaaaaggaccaggtcacttggtacgtcgtacttacactgaaggatttggtgtaccagcactttacgctgtctaccaagatgctactggtaacgctaaagacatcgcaatggactgggcaaaaggtgttggttcagcacgtgttggtcttctttcaacaaccttcaaagaagaaacagaagaagatttgtttggtgaacaagccgttcttatgggtggtttgacaagcttgatcgaagctggatttgaagttttgacagaagctggttacgcacctgaattggcttacttcgaagtacttcatgaaatgaaattgatcgttgacttgatctacgaaggtggcttcaagaaaatgcgtcaatcatgttcaaatactgcagaatttggtgattttgtaactggtcctcgtgttatcggtccagaagtaaaagaaaacatgaaagctgcccttgctgatatccaatcaggtaaatttgcacgtgaattcgttgaagaccacgatgctggtttcccacgtttgaaagccttccgcaaacaagctgaagaacttgaaattgaaaaagttggtgctgaattgcgtaaagcgatgccgttcgttggtcaaaacgacgatgacgccttcaaaatctacaactaattgtctgtagaagactaagcaagttgggacaccctggcttgcttttttgatcaatacacagcaacagaggtatgaaatgataacagcaaaagatgtggccaaggcccataaaatattaagtggagtcgttgtcaatacgccccttgaatacgaccactatttatctgaaaaatatggggcaaagatttatttgaaaaaagaaaacgcccaacgtgttcgttcgttcaagattcgtggagcgtattttgcaatttctcaactctcaaaagaagagcgtgagcgtggggtagtgtgtgcatctgcgggaaaccacgcgcaaggagttgcttatacttgtaatgaaatgaagattccagcgaccatcttcatgccgattacaacaccgcaacaaaagatcggccaagtccgattctttggtggggactatgtaacgattaagttggtcggggatacctttgatgcatcagcgaaggcggcccaagaatttactctcgcagaaaagcggacctttattgacccgtttgacgatccacatgtacaggctggacaaggaacagtggcctatgaaattcttgaggaagctcgaaaagaatcgattgcctttgatgctgtcctcgttcctgttggtggaggaggcctcatttcaggtgtttctacctacatcaaagaaacagagcctcggattgaggtcattggggtagaggctgaaggagcgcgttccatgaaggctgcttttgaagcaggtggtccagtcaaattaccagaaatcgataagtttgcagatgggattgccgttcaaaaggtgggccaattgacttatgaagtaacccgccagcatgtggaaactcttgttggagtcgatgaaggcttgatttcagagaccttgattgatctttattctaaacaagggatcgtagctgaaccagcgggagctgccagtgtggcatcccttgaaatcttgcgcgaatacatcaaggggaaaaccatttgttgtattatctcaggtgggaataatgatattaaccgcatgcctgaaatggaagagagggctttgatctacgatggcgtaaaacactactttatcgtcaacttcccacaacgtccaggggcccttcgagaatttgtaaatgatatcttagggccaaacgatgatatcacacgttttgaatacatcaagcgtgctagtaagggaacaggccctgtcttgattggggttactttggccaataagcatgactatgcaggcttggtcaatcgtattgagcgttttgatccgtctttcattaacttgaacggtaatgaaactctctataatatgttggtctgaggatagtatagcaacatcgtatttctatacaatggatgaattttatcaaattaagcaatatatttttatggaatatattgcttttttgttaggacttgtgatatgatatgcataaattacaaggagggatacttttatgcctgtattctttttatttctgttgttcttactgttggtcataggtggaattgcgattagctcactttatgtggtcaagcaacaatctgttgccatcatcgaacgttttggtcgctatcaaaaaattagcgatagtggcattcatatgcgagcgccttttggcatcgataaaattgcagcacgagttcaattgcgcgtcttgcagagtgagatcgtggttgaaacaaaaactcaggataacgtattcgttaccatgaatgtggcaactcaataccgagtgaacgaaagcaacgtaaaggatgcctactacaaactcatgcgtccagaatcacagattaaatcatacatcgaggatgcacttcgttcttctgtgcctaagttgaccttggatgaactgtttgagaaaaaagatgaaatcgctcttgaagttcaaaaacaagtggcagaagaaatgtcaacttatggatatattattgttaaaaccttgatcaccaaagttgagccagatgctgaagtgaaacaatccatgaatgagatcaatgcggcgcaaagaaaacgcgtggcagctcaggaattggcagaagcagacaagatcaagattgttactgctgccgaagcagaggcggaaaaagaccgtttgcacggggttggtattgccgagcaacggaaggccattgtcgatggattggcagactctattaaagagttaaaaggtgcgaatgtagatttgaccgaagaacaaatcatgtccattctcttaaccaaccaatacttggataccttaaataattttgcagataaagaagggaataatacgattttcctaccagcaaacccagatggcgtcgaaaacattcgtacacaaatattatcagccttgaaagcaaagtaaactttttctcattttttaaaaaaggttcgtattttcagcgattttagttgacaaaatgtgcaaaaaaatttatattagtattggaaataataatataggagaaagatcatggccaaatcgaactttgaaaaagtagaatcagttgttggttgggtacgcgataagaaaattacgggatatcgtatcagtaaagaaacaaatgcccgtgaaatgtctatcattgccttggctcaaggacgtgcaaaagtgaagaatatctcgtttgaaactgcacttggattgattgatttttatgacaaaaatcatcaaaaattcgaagattaatttgttgttccaattgaaaaccagagagtttgctctctggtttttttctatgcctcaaaagcagaagcggtacaaaaaaacagcttgcttccatactggtaagcaaactgtttcaagagattaatgtaagaagcgttgaaggaattccttggtccgttcttcttttggattgctaaagatttcttttggatctccttgctcagcgatgacacccttgtccatgaagataacccggctagatacatcgcgggcaaattccatttcgtgggtgacgacaatcatggtaagtccttctttagcgaggtcctgcatgattttcaagacttccccaaccatttctgggtctagggcagaagttggttcatcgaagagaatggcatcaggatccatagagagggcgcgtgcgatagcgacccgttgcttttgaccacctgaaagttgtttcggacgggcagcccaatattgagaacccataccgactttttcaaggttttcctttgcaactttctctgcagtttcacgatcacgcttgaggacggtcgtttgtgctacgatggtattttccaagacgtttaaattttcgaagagattaaaactttggaaaaccatccccaatttctcgcggtagtgggtaagatcatactcaggatcaagaacattttgcccacgatagagaatctctccagcagtaggagtctctagaagattgatggagcgaaggaaggttgattttccgctaccagagctcccgatgatggagatcacctctcctttttcaacggtgagcgaaatatctttcaagacttcattttgaccataagatttttttaaatgttgaatttcaagaattttttctgacattatttcacctccttgacttgcatttgatttgcacctgtagtataagtatcagaatctaagcgacgttcgatgtagcgaaggattcgtgtgatagtaaaggtgagaacgaagtaaatcacagcgatgatcgtaaaggttgggaagtattggtagttttgagttgcgaccgtatttcctgtaaagtacagttcaactacagagataacattcaaaacagatgtatccttgatgttaataacaaattcatttcctgttgctggcaagatattgcgaacaacctgtggaaggacgaccttgcgcatggtttgtccatgggtcattcctagagcagtcgctgcttcaaactgacctggatccactgctaagatcccaccacgaacaatctcactcatataagctccggtattgattgatacgataaagatggcggcccaggtacgatccaaggaaatgttgaaggcttgggcggaaccgtagaaaatgaccatggattgaacgatcatcggagttccacggaagatttcaatgtagacattgaggaaccaaccaaaggcagtttggcatccagcaaggaatttatttttagccttcggagctgtccggaagacaccgattaacaaaccgataatcaacccagcgatagttccagtcatagagattaagagggtcattccagttccccgtaagaactgtgggccattatcctttaaaatcttcatcatttggctaaagaaagtctgcttatcatcactagcatcactggaagctggttgcttcttaatcatatcatccatgagtttgacttggtcttcagacgaaatcttagctagtgcggcattgacttggtcaattctagtgtcacccttcttcatcccgatagcgattgtcgcatcttcttccccaacttcaaatccttttttgaattgaatcatcttaaatttagaattagcggactcggcggttagggcttcgggacgttcagaaacataggcatcaataacgcccgattctaaagcttgacgcatctgggcaaaatcacccattgcagtttcttgtttcacacccttgagttgggaaatgagagaatagaggtagaccccttgttgagaggtgacctttgcatccttaaagtcatctagactagtggcgtttgcatagtttccatctttacgaacgagcatgaccggttcactggtatagtagctcttggagaaggcgacctcttttttacgttcagcggttggactcatcccagcgataatcatatcgattttaccagaagtgagggctggaattaaaccgttccaagatgtttttacgatcagaggttttttacctaactcctcagcaacctttttggcgatttggacatcgtatccattggcatattgattggtaccgtcaattttaacagctccatttgcatcatcttcttgggtccagttgaaaggagcataagctgcttccatcccaatacgtaaatagtcatctgcatgagcaatctgtgtgatccctaagcaaatgaaaagccctgttaagagcgcaaatattgtttttttcattttttctcctcttccttattttaacttctcctattgtacagtaaaatagcctgcatttcaaacatggtcctctttttatttaaaaaatgctataataatacaaaggagcgtgatcaaatgaaaaagtatttgtatgtatttttcgcctttctggcctgcctttttgtcagtcagaatgtccatgcatctagcccatcttatgatgtgcttttctatggtggaaccttgaccttggatacctgggacgacgccacctatgaggaagaactggtttattatttcaaagattcttatagagggcagtatgtcagtctaggaacggcagggaacatgccacaaggctttgcaattgagataccgccaaaggttgaggtggaaggtcgtgagcttcaaagagaacccgagattacgaatctaggtgatggctaccgagtgaaaatttataacagtggtgtggcgacagatacagttaaaattaaagtcacatggaaattaaaaaatctcctctattcacacaaggatatcttgcagttaaactggaaaccaattacggatggggatcagaaggtggatgaagttcagtttcgtgttattcctaagttcgcgcccgccaatgcccaatcggaactgtatatccatacagcctttatgggaccggatgtgactgtgaagaaagaagatggaatctattctgccactttctataacctaggcaaaggaaaggctgtggagttgtatggttactggttgaagtcagacctaactaccttgtatgattctggtcgaaatacaggattgaccaaattggatgaatttcataagactcaagccaagattgaacaagaaaaatactggacacgcatgttttggaactggatcttaccagccttaattattgctctctggcttctttctctcttgggtcgcaaccggttcaaaaaaatgatttggcctggtgtgacctatccgaccaatactcgtctttatgagattccacaggacattgcacctctaattatgagttcggttgtttattcagctgaattagacgaggcttccccaaccaataaagagaaggcgactcctccggtatttacatttgaaaaaatgcttcaagctactttgctggatctgatggatcgtggagtgattgtctacgagcaacaaggaaatgaagtcgttttgacgagaaagtctcatggacatgtggatgattttgaacgctcctttatgaatatagcttttggggatcaagtttcctgtcctgttaaccgtctctttgagaattatgaatttagtgatgatgtatacaaacatgccaaaaaagcagatcaagatgcgattcgttcactaggaagtaaggctcaggctcgttttgatacggctgtgaaccaagtggcccgagatgttcatcgcaaggtggaagatctccatttgccaagctactatcgccctttagaggcaaaagaagaagcgcaagctagacgaagtctcttctttggttgggctgcttggtttatcgctcttggagcagaaatctttgccatctttgggatgggttggttctctgttccttgtttgatagggatcctcatactttggtttatgccagtgcgcttcaatggtgtctttaaagcttgtctacgagatggggttgtcaatcttgcgggtgctgagcaacgctattactgggatagttttggtcggatgttgaaagagattgctcacctcaacgatgcagagttgcagtctctggtcctatggaatcggttattggtctatgcggccttgtatggtgtagccgatcaggtcacaaaggtcatgaaacttcggaatattcatttagaaaatcaagccttaaacgccttcgtttacaccccattctatcatgatgtgacccactcaagtcatgccatgtctacttatggatcgacagcatcgacggctagtcatttcacagtttcctctggtagtggaggaggcttctctggcggtggtggcggcggaggctttggtgctttctaataagccaaaagatcagtcatagtcactccggccatactggctggagcgatctagcctggcgaatagaattatgatataatagagcaaatgtaagtttaggagaaaaagatgtttctgatcgaattaatcaaggcggttctttttgggattgtcgaggggattacagaatggttgccgatctcaagtacaggtcacttgattctgttacaggattttgtgcagtttaaaaatcaagatccagcctttatggagatgttcaatgtcgtgatccaattgggtgcgatcctagcggttgtggtgatttatttcgataaattatatcccttcaaacctggtaaatctccactagaagtacgtcggacttggcaattatgggcaaaagttgcggttgcaacgctcccgcttgtctttgtttttaaattagatgattggtttgaggctcattttcacaattctatttctgttgcgattatgttgatcacctacgggattgcctttatctatctggaaagacgagaacaagttgagccagcagtaacggaattgcataagctaccttatcgaacagctctttatatcggactcttccaagttttatcgctatttccaggaacaagccgttcaggtgctacgattgtaggtggcttgatcaatggtgttagccgtccagtagtgacagaatttaccttttatttggggatcccagctatgtttggtgctagcctcttaaaggttggaaaattcgctcttggcggacattcactagcactggggcaactctttattctactggtagcgatgggagtggcctttgtggtcagcatgtacgccatccgcttcttgacagattatgtgaaaaatcatgatttcaccgtctttgggaaataccggatcgttcttggttccatcttgttattgtatggcctcttccgtgttattttctaagagaaggtttgaactcgatcaaattattttcgaggttggagacttttatcccgacctcttttctatgcatcctttttttgaattctatccaattttttagtataatagtaagactagaagtatgaggttatgctatgaagatgaagcaaattagtgattcaacaattaagatcacgatccaactagaagacttagaagaacgtgggatggaaattgctgattttcttgtcccacaagaaaaaacagaagaatttttctacgccattttggatgaactcgaaatgccagaaagcttcctagatagcgggatgctgagttttcgtgtgacgccaaaaccagataaattggatgtttttgttaccaaatcaaaaattgaccaacaattggattttgaggatttgtcagatcttcctgatatggaagagttgtcgcgcatgacgccggatgaatttatcaaaaccttggaaaaaacgatctctgataagacaaaaggggatgcagaagccattcaccatttggaacaagaagagttacgtgataatcaagaacaagatccgacacctgaatccccagtgactcagtatatttattacattttgcgtttttcgaatatccagcaagcagttgccttttccaaaacggtgacttacccagtagatacctctgaattgtacaagatggggtcggaatattatttgacagtgctaattgatacagagaatcagcctatccaatatcctacttggttactcgcaactattcgagagtatgcggatgattcagaagtgacacgggcagttttacaggagcatgggtatttattgatggtatcaagtgcgatagagaatttaaagaaagttgctagtttatgatgtccttttctctgcaatttattctgatattgatcgggacctttttgattgcgcttgtgttgacgcctttggttcgtttattatcatttaaaatcggtgcagttgattaccctaatgctcgacgaatcaatactaagcccatgccaagtgctggtggattatctattgtaatcgccttttcgatcgcaaccttagtattcattcctacgctgacatctaatgccgcaccaatcaaaagttatctctcttataccttgccggttgtaggtgcaggatggatcattgctcttacaggcttgatcgatgatgtgaaagaattgtcagccaaaaagaagatgattggcattcttcttgcagcgagtatagtctggtttttgaccgatttcaggctgaatgatttcaagattccctttggtggtcctttgcttcattttgatccgtggttatcatatcttttgacggtgatttggatcatttctattaccaatgcggtcaatttaattgatggattagatggtttggtaagtggtgtatccattatttctctagtgacaatggggattgtttcctatttctttctgccagttccaaatctctttttgaccatgaccatttttgttttagttgcagcaatcgctggatttttcccctttaactaccatccagccattctttatctgggagacaccggtgctctgtttatcggatttatgatttctgtcttgtctttgcaaggcttgaaaaatgcgacagctgttgcggtagtcacgccaatgattatcctcggtgtaccgattacagatacctttttagctattatccgtcggaccctgtctggtcaaaaattttataaaccggatcgcaatcacctacatcaccgtctgctttctttaggcttgacgcaccgagggacagtacttgtgatctatgggatctcgatgatcttttccttgatttctctactgctcaatatttcaagtcgcattgggggcatcctacttgtgatcgggctcttgttcggagtagagttgttagcagaattaattgggattttggggccacatcatagtcctttgttaaatgttctgcgctatatagggaattcttcctatcgggaggaagttcgtcaaaaacgaaaagaaaaaactaaataagaatagttctaatcaaaagaaaagccatttaggcttttttttgatatacttgaaaggtaaaaaaatactttgtgatgaaggaatcgatgctttgagaaccttctagacttcaaagtaaaaagaaagggaatgcaatgtcgacattagaaattaaagaccttcacgttgaaattgaaggcaaagaaattttaaaaggtgtaaacctgactctaaaaactggtgagatcgcagccatcatgggaccaaacggaacagggaaatctactctgtcagctgccattatgggaaacccaaattatgaagtaaccaaaggggagattctgtttgatggtgtcaacatcttggaattggaagtagacgaacgtgcacggatgggcttgttccttgccatgcaatacccttcagaaatcccagggattaccaatgcagaatttttacgtgcagccatgaatgctggtaaagaagaggacgagaagatctctattcgtgatttcatcaaaaaattggatgaaaagatggaactgctcaacatgaaagaagaaatggcagaacgctatttgaacgaaggcttctctggtggtgagaaaaaacgcaatgaaatccttcaattgttaatgttggaaccaacatttgcccttttggatgaaattgactctggtttggatatcgatgctcttaaggtcgtatctaaaggggttaatgcaatgcggggtgaaggttttggagcgatgatcatcacccactaccaacgtttgttgaactatattactcctgacgtcgttcatgtgatgatggaaggacgtgtcgtgctttcaggtgggccagaattggctgcacgcttggaacgtgaaggctatgcccaactcgcagaagaactcggttacgactataaagaagaactataacctgatgacaagtgatctaatgttgtcatagaatcaaacagatagtatctttattaggagaaaaaaatgagtattgaaaatattaccctcttttcggaactgcatgctgagccaagctggctgcaagatttacgaaaaaaagcttttgacaagatcgatcagttggaattgccggccattgaacgcgtcaaattccaccgctggaatcttggcgatggaacgatcacagaaagcgaggcttctgccaatgttcctgattttacagccctcgattcgaacttaaaattggtccaagttggaactcagactgtatttgaacaggtgccacaagccttggcagaccaaggagttctttttacagatttccatactgccctagaagaaattccgcaggtgatggaagattacttcatgtcttccgttaaatacgatgatgacaaactagcagcataccacacagcttattttaatagtggggctgttctctatattccagataacgtcgaaatttcagaaccaatcgaaggtattttctaccaggatagcgacagtgatgtaccttttaataagcacattttgattatcgcaggtaaaaacagcaagttcagctatttggaacgcttggaatcaaaaggtgatggctcagcaaaagcaactgctaatgtgacggttgaggtgattgcccgctccggtgctcaagtgaaatttgcggcgattgaccgtctgggtgaaaatgtcacagcctacatcagtcgacgtggaaaactaggtcaggatgccagcattgattgggccatcggtgtcatgaatgaaggcaacgtggttgcagactttgacagtgacttggttggaaacggaagtcatgcagatttgaaagtcgttgcattatcaagcggtcgtcaggtgcaaggaattgacacccgtgtgaccaactttggttgcaactcgatcggaaatttcttacaacacggggttattcttgaaaaaggaaccttgaccttcaacgggattggtcatattattaaaggggccaaaggagcagatgctcagcaagaaagccgtgtcttgatgttatcggatcaagcgcgttcagatgccaatccaatcctcttgattgatgaaaatgacgtcacggcaggccatgctgcatcgatcggtcaagtggacccagaagatatgtattaccttatgagtcgtggtctggatcaacacacagcagaacgtttagtggtgcgtggtttcttgggatctgttattgttgaaatcccagttaaagaagtacgtgatgaaatgattgctaccatcgaagaaaagttatctcaacgctaaggagaaacaatgctagataaaaatacgattgctcaagattttcccattctcgatcaactagtccacgatgagcctttggtttatctagataatgcagcgacgacgcaaaaacctaaacgtgttcttgaagcagtcaatcactattatttgcaagataacgccaatgtccatcgtggagtccataccttggctgaacgagcgacagctgcttatgaggcggcgcgtgagaaagtcagaaaatttatcaacgcttcatcaaccaaggaagtgctctttacaagaggaacaacgaccggactcaactgggtagcccgctatgcagaagaagtcctaaaggaaggggatgaagtcctgatttccatcatggaacatcactccaacatcattccttggcagcaagcctgcaagaaaacaggagcaaaactggtctatgtctatctaaaagatggcttactggatatgcaggacttaaagagcaagcttagtgagaagacaaaatttgtctctatcacccatgcttcaaatgtcttaggggtggtcaatccgatcaaggaaattgctcgattagctcatgaagttggagcgataatggtcgtagatggggctcaatcaacccctcatatggccattgatgtacaagacttagatgcggatttctttgctttttctggccataagatggctgcaccaacagggattggtgtcctctatgggaaagaagaaatattagagcaaatgtctccgatcgagtttgggggcgagatgattgactttgtttacgagcaatctgcctcttggaaggaattaccttggaaatttgaagctggaacccctaatatggcgggtgcaattggacttggtgcagcaatcgattacttagaagagctggggatggaacaggtagaagcgcatgagcaagaattgattgcctatgtgtttccaaaattacaggctatcgaaggcttgaccatctatggttcccaagacttagcccaacgttctggcgtcatttcctttaatctaggagatctccatccgcatgacttggcaacagcattagattatgaagggattgctgttcgtgcaggtcaccactgtgcacaaccgctccttcaatacctacaagttccggcgacaacgagagcaagtttttatatctacaacaccaaagcggactgtgataaattaattgaggcattgatcaaagcaaaggagtttttcaatggcactttctaaattagattcgctgtacatggcggtcgtagctgaccattcaaaacacccgcatcaccaagggcagattgaagatgttgataagatccaactcaacaatccaacttgtggagatgtgatccagttaagtgtgaaatttgatgagaatgacagggtggaagatattgcctttgtgaattcaggctgtacgatctcaacagcttcagctagcatgatgacagatgctgtaatgggaaaaacaaaagaggaagtcgaagaattggcacaggtcttttcagaaatggtccaaggggagtcagatcctcgccaagaggaattgggagacgcagcctttttatctggagtctcaaaatttccacaacggattaaatgtgcaaccctctcctggaatgctctcaaaaaagcgatcgaacgtagcaaataattaaaagaagaaacagagaaagaaaggaaattatggctgaagaaagagtcgaaccgaaaccaattgatctcggtgaatataaatttggatttcacgatgacgttcaacccattctctctaccgggaagggattgaatgaagcggttattcgtgaattgtctgcagcaaaaaatgaaccagaatggatgctcgaattccgtttgaaatcttttgaaaccttcaaaaagatgcccatgcaaacctggggagccgatctatcagagattgactttgatgatttgatctattatcaaaaaccttcggataaacctgcccgttcatgggacgaagttccagagaaaatcaaggaaacctttgagcgtatcgggattcctgaagcagaacgtgcttacttagcaggggcttctgctcagtatgaatcagaagtggtttaccacaatatgaaagaagagtttgaaaagttagggattatctttaccgatacggattctgccctaaaagaatacccagaccttttcaaacagtattttgcgaagttagtaccaccaactgataacaaattggctgccctcaactcagcagtctggtctggtggaaccttcatttatgtaccaaaaggcgtaaaagtagacgttccccttcaaacttacttccgtattaacaatgagaatacaggtcagtttgagcgtaccttgattatcgttgatgagggagcaagtgttcactatgtagaaggctgtacagcaccgacctattcaagcaatagcctccatgctgcgattgttgagatctttgccttggatggtgcttatatgcgttacacgaccatccaaaactggtcggacaatgtctacaacctggtcaccaagcgggccaaagctcagaaagatgccacagttgagtggatcgacgggaacttaggagcgaagacgaccatgaagtacccatctgtttatctggatggagaaggagcgcgtgggaccatgttgtccattgcctttgcgaatgcaggtcaacaccaagatacaggtgccaagatgatccacaatgcccctcacactagctcgtctatcgtgtcgaaatccatcgcgaagggtggcggaaaggtagactaccgtggacaagttacctttaacaaaaattccaagaaatcagtttcccacatcgagtgtgacaccattattatggatgatttgtcagcatcagataccattccatttaatgaaattcacaactcacaagttgctttggagcacgaagctaaggtttcaaaaatctcagaagaacaactttattatttgatgagtcgtggtttgtctgaatcagaagcgacagaaatgattgtcatgggatttgtagagccctttacaaaagaacttccaatggaatacgccgttgagttaaaccgactcattagctacgaaatggaaggatctgtaggataattcgttttaatagcaaaataaaatcacaatggatttgactccattgtgatttttttgcttatagcttttcgttgacataacgaacaaattcgttccaccaaacctttaagaaaaagcttttctcaatggttcttcctgctaccatatcgactgtcggctcttgatcttctaagtagcctcgcccgattttatttggatctgagtattggagaattccaacatcatctccagattttacaggggctttgaattggttttgactacttttgaattggatcttaggttcagtttgattgccttgttttaccacgacatagaagtcttttttggcaacagccgaaacgaactcaaacttcccatccgtaatggcgaccttactttttccataggtatctcctctctttacgacaatggaagaaacaaaggttcgtaccacgtaattcatcagtgatgaagttgctacaaagcgtgcataaggatcaccgtcaactgcttcaacacctaagacaactgtgatcatgtggataccattttgcgtcgttgatgcagcaaaggtaattcctcctttggtggagttgctgactcgaaggccgtcgactccagaacggtaattcggcatcccttctagcattaggttggggttttcaatctgcgtgtttgaaaaaagagcagtgggttttgaagtatatttggtcacttcaggaaaatcctggagtaagtgcttggcaataacagcaatatcataagcactcaattgattttcgtcttctttcccgtcaggatctccgctgatggtttgagtatttaatccggtagcattaattaaatgaggtgattgaatgccccattcagaaagtttttgcttcattttttcaacgaagcttttttcggagccccccactttctcagctaaggcgaaggcggcagtgctagaatttccaactaaaagagcagtcaataactgatcaaccgtatattggtttgcctcaatgggaagaattccagcacctttaatatcatttaaggccaatgcctcctcggataatttgattgggtcttttaacgaaagttttttgtcatgaatggcttcgaaaattagataagtggtcagcagtgtagacaatcctccaacttctcgctttttatccgaatctttttcatacaagatcttaccagtgtctgcttcgacagcgatggcactttgaacaggaagatccggctcgttcgcaaaaatcctttgaggtggtagactgcataaaagtaggatgaaggttaaaaaagaaagaaagaattttttcacggtaatttcctcattatttagtcttctctattgtatcatacaaaatctgaatagaaaattggaaaatcatcatcaagctaaaaagtcagtcgtatcaaggtttttgaatggtgacaacgcaaatattcagaaaatttagtttacttttttttctagttgtgatataatcttaaacaaatctaaaaaaactattggagaattcctatgaaaaaaggtaaagtattcgcggttgctggagtaacactccttgcggctggattgttggctgcatgttctggttcaaacactagcaaagcaagctcaggtgaagacaaaaactatggttatgtttactcagatgatcctcaaactttggactacacagtatcttctaaagctgctacacatgatatcactacaaatgttgtagatggtttgatggcaaatgacaagtatggtaatctcgtaccatcacttgcggaagattggtctgtttcaaaagacggtttgacttatacctacaagattcgtaaaggggttaaatggtacgatgcagacggtgaagaacacggtgaagttacagccaaggacttcgtgacaggcttgaaacacgctgctgataaaaaatctgaaactcttccactagttcaaggatctatcaaaggcttggatgattatgttcaagggaaaatcacagactttagccaagttggtgtcaaagctgttgatgattacacacttgagtatacattgaataaaccagaaactttctggaattctaaaactacaaacggaattttgttcccaattagcacagagttcttaaagagtaagggtgatgattttggtcaaccaaacgatgtgaaatcaatccttgcaaatggaccattccttcttaaatctattacttcaaaatcatctgttgtatttgaaaagaacgacaattactgggataagaaaaacgttcaccttaaagaagtgaaacttacttactacgatggatcagaccaagattcattggcacgtggcttctctgatggggcttatacagttgctcgtttgttccctgcaagttcaaactttgcaactatttcgaaaaaatacaaagacaatatctacaacacaccagctggttcaggtgtagcggtccttggtttcaacatcgaccgtcaatcatacaaacacactgctaaaaaatcagatgctgaaaaggctgcgactaagaaagcaatcttgaacaaagatttccgtcaagcaattacctttgcgttagaccgtgaaagctattctgcacagctaaatagtaaagaatttgctaaaccagctatccgtaatacctacacagctccagcctttgtgcaagtaaatggaaaagattttggagatgtagttgcagataagttgactacttatggagaccaatggaagggtatcaaccttgcagatggtcaagacggtctttacaataaagacaaagccaaagcccaacttgaaaaagcgaaagctgaacttcaaaaagatggcgttcaattcccgattcatattgatgtaccagtagcacaaagctcaaaaggatttgttgctcgtatgcaatctttgaaacaaacagtggaagacactcttggtaaagacaatgttgttcttgatcttcaaatgatggaccaagatgaagtattgaacattactttgaatgtaccatcagcagcagatgctgattgggaccttcaaggattggttggatggaacccagactatgatgatccatcaacttacctcgatacacttcaaccatcttcagaagaccaaacaaaagtataccttggttttgcaggtggtgtggacaacgcttctgctaaagcagttggcttagatgagtatgcaaaacttcttgcagatgccaatagtgagtcattggatgtaacgaaacgttacgaaaaatatgctactgctcaagcttggttgagtgacagtgccttggtaatcccaacaatgtcaagtacaggtgcagcaactgtcatctctaaagtggtcccattctctggcccatcatctcaaacaggtaacaaaggatcttcatacttcaaatatgtagaagttcaagatgaaccagttactaagaaacaatacgaacaagcacgtgaaaaatggcaaaaagaaaaagctgagtcaaacaaaaaagctcaacaagatcttgaaaaacacgttaaataattaaattattgcttttcattagaactttctcttctaggggagaaagttcttttggacattaaaggaatgaaatatgaaaaaatatgtttttatgcgtattttgcgttcgttagtgtcgatctttctcgtcacgacattaacctacatgattatctatacgctaacaccgagaaatctcatctttaagaatgaccctaactacaataaagtagcgaagacaaaagattcgaagatcaactacgaaaatactgtctacgatcgcatgggttatttggaatacatggattcaaagagcttgcaacaaaaagcaagtgaagaagattcttctgtaacagttgatgcgactactgctaatgaaaagatctataaagaatacattaaaaaattaggtcatggttggcagttgaaacgtttcccggaaagtaagtctttctatgcggtgcgtgaaattccggtttttgaacgtgtcatcagcttctatgcgaatttgattcagtttgatcatccaggttgggtgaaagatgcctcaaatccaaatctcaaacgctatatccgtattgaaaatgatccatctattggttggtcagttgtaggttctggtacgaaacacaaatacctcttgtactttaatggtcaattcccatatgtgcatcaaaactttgtaaccttaaaccttggaaattcatatccaacttattcaaatacccctgttcttcaagtgattacccaaggacaaggaacaactaagaagagtgaagtgaacttcccaacagctaaaaagacatcttccatcgatatctactcacgtacctacaaatcaccaagtaaggcagactcacaagacatcagtcgatttggtaaaggggacgcttatacagcaacgttgagcaactatgaaaatccatccatgattgcatcttcttcaattattggtttgattggtattgcgattgcttacttgattgcgatcccattagggtcttacatggctctgttcaagaactcatggtttgatagcatctcaacagcaaccttgacatttatgatgtctcttccaactattgcccttgtttacattgtgcgtctagcaggttcatttgttggacttccagactcattcccagtacttggagcacaggattggcgttcatatgtattgccttctctgattcttggtttgttgagtgcgccatttatcgcagtttggattcgtcgttacatgatcgatatccactcgcaagatttcgtccgttttgctcgttcaaaaggattgtcagaacgtgagatctcaagaaaacacatcttcaaaaatgcgatggttccattggtatctggtattccaggttctattattggagttatctcaggtgcgacacttactgaaacagtcttcgctttcccaggtatgggtaaaatgttgattgactctattaaagcatcaaacaacaccatggtcatcggacttgtcttcatcttcacatcacttggtatctttgctgccatgttaggtgatatcttgatgacagtgcttgatccacggattaaattaacgaatacgaaaggaggcaaataatggctacaatcgataaaaataaatttcagtttgtaaaacgcgatgactttgcctctgaagtaatcgatgctccagcgtattcatactggaaatctgtattcagacaattcttgaaaaaaagaaccactatcattatgcttgctattttggttgggattctcttgatgagttttgtctatcctatgttttcaaattttgattacaacgacgtaagtaaggtaaatgacttttcagcacgtttgaatccaccaagtgggaaagcactatttggtacagataataacggtaaatccctctttgatggagtttggtttggtgctcgaaattccattattatttcctttatcgcaactgttattaacgtggtggtcggagtcatcgttggtggaatttggggaatctcaaaatccatcgatcgtatcatgatggaagtttataacgttatttcaaacattccatttatgttgatcgttatcgtcttgacttactcaatgggatctggattctggaacttgattcttgccatgtccttaactggatggatcggaattgcttataccattcgtgtccaaatcatgcgttaccgtgatttggagtacaaccttgccagccgaacattaggaacaccaacaatgaaaattgttacgaaaaatattttacctcaattggtatctgttatcgtgacacaaacatcacagttgcttccaagctttatttcttacgaagccttcctttccttcttcggacttggtcttccaatcacagttccaagtttgggccggttgatttctgactattctcaaaacgtaactacaaatgcttacctattctggattccgcttactgttttgattttagtatccttgtcattctttatcgtcggacaaaacttggccgatgccagcgacccacgtacacatagataggaggagtagatatgacatcaaataacaatattattttatctgctcaagatatcgtagtggaatttgacgtgcgcgatcgcgtactgacagctattcgtggcgtatcgcttgagctagtcgaaggtgaagttcttgccttagttggtgagtcaggttcagggaaatcagttttgacaaaaacgttcaccggaatgttagaagataacggccgtattgcccaaggttcgattaaatatcgtggtcaagaattgacagatttgaaatcgaataaagattgggaaaatattcgtggatctaagatcgctacaattttccaagacccaatgacaagtttggatccaatcaatacaattggctcacaaattaccgaagtcattatcaaacaccaagggaaaacagctaaagaagccagagaaatggctttggactatatggaaaaagttggaattccagatgctgaacgtcgttttgatgagtatccattccaatattcaggtgggatgcgtcaacggatcgttattgccatcgccttggcctgccgcccagatatcttaatctgtgacgaaccaacaacagcccttgatgtaaccattcaagcgcaaatcattgatttgttgaaatcccttcaaaaagaataccaatttacagttatctttatcacccacgacttaggtgtggttgcaagtattgcagataaagtagccgttatgtatgctggagaaattgttgagtttggtaaggtagaagaaattttctacgatccaaaacatccatacacatggagcttgctttcaagcttgcctcaattgtcaacctcagatggtgatctttactctattccagggactccgccatcattgtatgctccaatcaaaggagatgccttcgcacttcgttcagactatgcaatgcagattgattttgaagaagaggcaccggctttcaaagtgaccgatactcactgggctaagacatggttgctccatccagatgcaccaacagttcataaaccagaagtaatcgaaaaccttcacgaaaagattggctcaaaaatgggcttcactcacatgacagaataggaggaaggaaatgactgaaaaattagttgaaattaaagatttagaaatttccttcggtgaaggaagtaaaaaattcgttgctgttaaaaacgccaacttcttcattaataagggagaaactttctctcttgttggtgaatcaggaagtgggaagacgacaattggacgtgcgatcatcggtttgaatgatacaagtgctggagaaattatttatgatggtcgcaagatcaacggaaaaaactctcatagtgaaaaatcagagttgatccgtaaaattcaaatgatcttccaagacccagcagcaagtctgaatgaacgtgcaacagttgattatattatctctgaaggtttgatcaaccaccatttgtttaacagtgaagaagaacgtcaggaaaaagtaaaaaatattatgcatgaagttgggcttcttgcagaacatttgacacgttaccctcatgaattctcaggtggacaacgtcaacggatcggtattgcccgtgcacttgttatggaaccagaatttgtcattgcggatgaaccaatctcagcccttgacgtttcagtacgtgcgcaggtcttgaaccttttgaaaaaattccaaagagaattaggcttgacctacctctttatcgcccatgacttgtcagttgtgcgcttcatttctgaccgtattgcagttatctataaaggggttattgtagaagtagcagaaactgaagagctatttaaccacccaatccatccatatactcaatccctactttcagcggtcccaattccagatccaattctagaacgtaaaaaagttctaaaaatttatgatccggaacaacatgattattctgaagataaaccacaaatggttgaaattaaaccaggtcattatgtatgggctaacaaagctgaagaaaataaatacagacaagaatataaatagagaggctttcctctctattttctttatggctttttgtcaactgtagtggatgacgaaaagctaacatttagagaggaccggataggtcttccttattttatatgtttagagtgatgaaaacacgcttcctaaagttgatagagtttctaaaacaaaatcctataggtttgatgtctttgatcaacttattagtcgttttgagtttcgcgtttgaatcgtctgtttctagcgtatttatgatgtgtctaaggaaagtcctaaatggtgatgaaccgttcctctatcagctcaaagaacttatctactctcttctcctgaaaagtctagtgttttctcaactatttcatatgtgatcaaggtttgacggaaagtcattgaatgaaaagagttgagagataacttacggatttctttttgaaagattcgccagtgaatatttaaggcacgatagggtagtgacttcttatcaaattggttcataatcgaaatcttgtctttaaaaacacgcgtccaaggtgatgggaaatgtggaaacgatcaagaacgattttagcgtttaaaaagcgttttcgagccaatgggatataggttctgatatatcatcgcgataaattggaccttttgccgagctttcaatgaatacaaaaaaagtagttttgtatagtaatttggagatctttatcgaggaggataatgagttcgctggactcatagttttgtgtcacaaaaactaagtcacctttcttaaaaccaaactccttccaaaacataatctttgagagttggtcataatgtttcttgaaagtaaattggtaatgcatatgatagacagtataggttaacacatgaagttttcaatcaatatccattagaggttccttctgagttagggggtgtgtaatttttttcggacaagggttgagatataacatatattcttaataaatgatgtttcggcaatcatgacactcctacagcttttacactggaaacaatgtttctttagacgtagtagtgttgaagttccagcttattcaagaagaggaattttagaaggtttttgaaagtattatttaatcatctttccttggcaatggggaataatggtacaggataatcaaattttacttgaatctcaatatgattatcagtttaaaaaacgaatgaaataatgatattagtgtctttaattccgaataattctgtgctattcttaatgagtcccataggttcttcctaatggtagtttcgtcgcttttcattatagttattataggagtatttgtttataagtaaaaagttctaaaatctatagaatagttttccccgctataggaattattgagccagagttttttactatatctaataaaagaataaaattgtaaagaagtaatttttctaaagcatgaaaagcctgtattatgagctattttcgatttttttaaaaaattttttaaaaaaagtaaaattttttcaaaaaaagtgttgacagtaagagtaggtcatgatatactaatatagttgtcgcgagagagcgacaaagacctttgaaaactgaacaagacgaaccaatgtgcagggcgctacaatgaaagttgtagtaactgaacaataaaaaacaataaatctgtcagtgacagaatgagtttaagacaaacaattattttaatgagagtttgatcctggctcaggatgaacgctggcggcgtgcctaatacatgcaagtagaacgctgaagcttggtgcttgcaccgagcggaggagttgcgaacgggtgagtaacgcgtaggtaacctgcctcttagcgggggataactattggaaacgatagctaataccgcataaaagtcgacattgcatgatgttgacttgaaaggtgcaactgcatcactaagagatggacctgcgttgtattagctagttggtgaggtaacggctcaccaaggcgacgatacatagccgacctgagagggtgatcggccacactgggactgagacacggcccagactcctacgggaggcagcagtagggaatcttcggcaatggacggaagtctgaccgagcaacgccgcgtgagtgaagaaggttttcggatcgtaaagctctgttgtaagagaagaacgagtgtgagagtggaaagttcacactgtgacggtaacttaccagaaagggacggctaactacgtgccagcagccgcggtaatacgtaggtcccgagcgttatccggatttattgggcgtaaagcgagcgcaggcggttagataagtctgaagttaaaggctgtggcttaaccatagtacgctttggaaactgtttaacttgagtgcagaaggggagagtggaattccatgtgtagcggtgaaatgcgtagatatatggaggaacaccggtggcgaaagcggctctctggtctgtaactgacgctgaggctcgaaagcgtggggagcaaacaggattagataccctggtagtccacgccgtaaacgatgagtgctaggtgttgggtcctttccgggactcagtgccgcagctaacgcattaagcactccgcctggggagtacgaccgcaaggttgaaactcaaaggaattgacgggggcccgcacaagcggtggagcatgtggtttaattcgaagcaacgcgaagaaccttaccaggtcttgacatccctctgaccgctctagagatagagctttccttcgggacagaggtgacaggtggtgcatggttgtcgtcagctcgtgtcgtgagatgttgggttaagtcccgcaacgagcgcaacccctattgttagttgccatcatttagttgggcactctagcgagactgccggtaataaaccggaggaaggtggggatgacgtcaaatcatcatgccccttatgacctgggctacacacgtgctacaatggctggtacaacgagtcgcgagtcggtgacggcaagctaatctcttaaagccagtctcagttcggattgtaggctgcaactcgcctacatgaagtcggaatcgctagtaatcgcggatcagcacgccgcggtgaatacgttcccgggccttgtacacaccgcccgtcacaccacgagagtttgtaacacccgaagtcggtgaggtaaccttttaggagccagccgcctaaggtgggatagatgattggggtgaagtcgtaacaaggtagccgtatcggaaggtgcggctggatcacctcctttctaaggaaaaggaaccctgtacgttggtcttgtttagttttgagaggtcttgtggggccttagctcagctgggagagcgcctgctttgcacgcaggaggtcagcggttcgatcccgctaggctccattaacactatagtagtgttaagcttgaacattgaaaattgaatatctatatcaaatagtaacaagaaaataaaccgaaacgctgtaaatatttaaagagtttaggtcgtaagaccaaaaataaggttaagttaataagggcgcacggtggatgccttggcactagaagccgaagaaggacgtgacaaacgacgaaatgctttggggagctgtaagtaagcgacgatccagagatgtccgaatgggggaacccactagctaatggctagtactcctatctgttaaggataggtagaggaagacgcagtgaactgaaacatctaagtagctgcaggaagagaaagcaaaagcgattgcctgagtagcggcgagcgaaacggcaggagggcaaaccgaagagtttactcttcggggttgtaggactgcaatgtggacataaagagtatagaagaatgacatgggaaggtcagccaaagagagtaagagcctcgtattcgaaatagtctttatacctagcagtatcctgagtacggcgggacacgagaaatcccgtcggaatctgggaggaccatctcccaaccctaaatactctctagtgaccgatagtgaaccagtaccgtgagggaaaggtgaaaagcaccccgggaggggagtgaaatagaacctgaaaccgtgtgcctacaacaagttcgagcccgttaatgggtgagagcgtgccttttgtagaatgaaccggcgagttacgatatgatgcgaggttaagttgaagagacggagccgtagggaaaccgagtctgaatagggcgcaatagtattatgtcgtagacccgaaaccatgtgacctacccatgagcaggttgaaggtgaggtaaaactcactggaggaccgaaccagggcacgttgaaaagtgcttggatgacttgtgggtagcggagaaattccaaacgaacttggagatagctggttctctccgaaatagctttagggctagcgtcgacattaagattcttggaggtagagcactgtttgggtgaggggtccatcccggattaccaatctcagataaactccgaatgccaaagaattatggtcggcagtcagactgcgagtgctaagatccgtagtcgaaagggaaacagcccagaccaccagctaaggtcccaaaataattgttaagtggaaaaggatgtggggttgcacagacaactaggatgttagcttagaagcagctattcattcaaagagtgcgtaatagctcactagtcgagtgaccctgcgccgaaaatgtaccggggctaaaacaatttaccgaagctgtggatacctttataggtatggtaggagagcgttctatgtgtggagaaggtgtaccgtgaggagcgctggaacgcatagaagtgagaatgccggtatgagtagcgaaagacaggtgagaatcctgtccaccgtaagactaaggtttccaggggaaggctcgtccgccctgggttagtcgggacctaaggagagaccgaaaggtgtatccgatggacaacaggttgatattcctgtactagagtatgtagtgaaggagggacgcagtaggctaactaaagcgtgcgactggaagtgcacgtctaagcagtgaggtgtgaattgagttaaatgcttaattctgtaacattgagctgtgatggggagcgaagtttagtagcgaagttagtgacgtcacactgccaagaaaagcttctagcgttaatcatactctacccgtaccgcaaaccgacacaggtagtcgaggcgagtagcctcaggtgagcgagagaactctcgttaaggaactcggcaaaatgaccccgtaacttcgggagaaggggtgctggctttgagtcagccgcagtgaataggcccaagcaactgtttatcaaaaacacagctctctgctaaatcgtaagatgatgtatagggggtgacgcctgcccggtgctggaaggttaagaggagtgcttagcgtaagcgaaggtatgaattgaagccccagtaaacggcggccgtaactataacggtcctaaggtagcgaaattccttgtcgggtaagttccgacccgcacgaaaggcgtaatgatttgggcactgtctcaacgagagactcggtgaaattttagtacctgtgaagatgcaggttacccgcgacaggacggaaagaccccatggagctttactgcagtttgatattgagtgtctgtgccacatgtacaggataggtaggagccatagagatcgggacgccagtttcgatggaggcgttgttgggatactacccttgtgttatggccactctaacccggtaggtttatcatctacggagacagtgtctgacgggcagtttgactggggcggtcgcctcctaaaaggtaacggaggcgcccaaaggttccctcagaatggttggaaatcattcgtagagtgtaaaggtataagggagcttgactgcgagagctacaactcgagcagggacgaaagtcgggcttagtgatccggtggttccgtatggaagggccatcgctcaacggataaaagctaccctggggataacaggcttatctcccccaagagttcacatcgacggggaggtttggcacctcgatgtcggctcgtcgcatcctggggctgtagtcggtcccaagggttgggctgttcgcccattaaagcggcacgcgagctgggttcagaacgtcgtgagacagttcggtccctatccgtcgcgggcgtaggaaatttgagaggatctgctcctagtacgagaggaccagagtggacttaccgctggtgtaccagttgtctcgccagaggcatcgctgggtagctatgtagggaagggataaacgctgaaagcatctaagtgtgaaacccacctcaagatgagatttcccataactatatgttagtaagagccctgagagaagatcaggtagataggttaggagtggaagttgtgtgagcaatggagcggactaatactaatagctcgaggacttatccaaagagtcgaaagatattgacaacgtaagtttaacttgttagaatatagatattcaattttgaatgtttaaacattcagagttaagtgacgatagcctaggagatacacctgtacccatgccgaacacagcagttaagccctagaacgccggaagtagttgggggttgccccctgtgagataaggaagtcgcttagcttgattccgccatagctcagttggtagtagcgcatgactgttaatcatgatgtcgtaggttcgagtcctactggcggagtatattcaaagaggtcaattattgatcttttttattttttagaaaaagctctattaggcaattggagcttcagaatgtatacaatcccaataaacaatagaaaatttgtattttgaggttgcttaccatatagtggaaactcttaggaatgctgatatagtattatttttaagagttttttttgctttctctagtaaaaaaagattgaagaaagcaatcaaaattgattttttcttcaatccgaagtacccgtttagtaacggaacatttatctatttatcagttatttgggaaaaatgcattatataaagctttaatggctttttcttcttgttttttacttacaacgaacataatggaaacttcactagaaccttgtgaaatcatttgaatattaatttcattttctgatagtgctttggctgcagttgccgtaaccccaacttgacttttcattttttcaccaacaatcatgatgattgaaagatcatgttcaatctcagcagtgtcaacttcaagtttctgagttaattgttttaaaatttcttgttctttaattggagtgagttcacgtgaacgcaagattatagataagtcatcgataccagttggcatgtgttcccaactaatatttagatcttctagtacttgtaaaactttacgaccaaagccaacttcacggttcatgaggtatttggtcatatttatacttacgaaacctgaatcacctgcgattcctactacagttacatgatcattagaatgttctaaaacaattcttgtaccaggatgatttggattgtttgtattttttattactagaggaattttacctctgtatgctggtacgagagcctcatcatgcaagactgaaaacccagcataggctaattcacgcatctctttgtaggttaactcaggaatcgagtggggatttttaataataccagggtgtgcagcaaatattccattgacatccgtaaagttttcgtataagtctgcttttacaccagcagcaatgattgatcctgtaatatcagaaccaccacgagaaaatgtacaaatgtccccatcttgggtaacaccaaagaatcctggaatgacaatcacttcacttgaatctttaagttcttcgattttatcgtaactagatggcaaaatccgcgcgttggaaggttctgcagtaacggtaattcctgcttcttttggatgaatatatcttgattctaagccattttgattgaaataagcagcaatgagtttagcattgttattttcaccagcagctaggaatgcatcgtatgtaaatgggtttccttttttgggtaaatttgtcaaatcatagatatcttcagcaatttcttgaataatggattctttgagacccaattcttccgtaatagcacgataacgctctataatccactgttgtgtttgagtaacatccttatctgaagtaaattctttataatatcgaatcagagcatctgttacttttgtatcttctgcattgcgtttacctggagccgatacaactacaaaccttctttctggatcatctttaatgatatcaagtactttttttaattgagaagctgatgctagagaacttccaccgaattttgttactttcatgttttctccttaatagttttcattaatacattataccaaagttcagttattgatacaatttatttcctgataggaaatagtatttgtaacttttgaggcaaaaggttgaaactattcaaactttacaattttgttacatcatatagatatattttactaattttgttttttgtggtatgatatgttataattcataagttttaatatcaaaatatttaatattaaaacaaaaggagtctgagatgtttgaaacaattttgtattcagttgaaaatgacctagcaacgatttctttaaatcgtcctgaggtatcaaatggttttaacattccaatgtgtcaagaaattttagctgctttggaagatgcagaaaccaatgaggaagttaaattcattattctgtcagcagaaggaaaaatcttttcagttggtggggatttgagcgaaatgaaacgtgcagttgatgcggatgacatcgagtctcttgtcttaattgcggaattggttaatacgatttcaaagaaaattaaacaattgcctaagccagttatcatggtggcagatggagctgtcgcaggagcagcagcaaacattgcagtagctgttgatttttgtattattagtgagcggacaaaattcattcaggcttttgttggggttggtttagcaccagatgcaggtggtttattcttattaggaaaatctattggaatgtctcgtgctactcatttagtaatgacgggtgaagccctgaacgctgaaaaggcatttgattatggcctagcttaccgtgtatgtgaatctgataaactcgataagacggtagatcaactgcttaaaaaattaagaagaggatcttcaaattcttatgctgctatgaaagaaatggtatgggaagcattcctgaaagattgggatcaatatgcgggtcttgaattggaattgcaaaagaaactagcttttacggaagattttaaggagggggttattgcctactctgaaaaacgacgtccacaatttaaaggaaaataaatttgtattttttctgtgttttttgaaaaaatgcttgcaaattattttcatttttgatacaattcgactgtcaaagtaatttaggaggtggagttttgaattaccaattagttaacgattatttaacatccatctttaataatgttttggttattgaggagtcgagcctaagagcaagtcgattcaaagatgtttctattaaagaaatgcatacaatcgacgtgattggttcgacaccgaatgcaacaccgagtgatatttcacgggagttgatggtgactttggggactgtcacgacaagtttgaataatcttgaacgcaaagggtatatcgaaagaagaagatcagaggttgatcgccgggttgtacacttaagtttaacgaaaaacggtcgtctcctttatcgtcttcatcagcaattccataaacggatggtcaaccaaattattggagatatgagtcctgaagagaagaaagtgatgcaaaaggggttacagaatttgtatcgtttcttggaggaaatcaaataatggtctttgctaaaataagtcaagttgctcattatgcacctgaccaagtcatatcaaatgatgatttggctgagatcatggatactagtgatgaatggatcagtagtcggacaggtatccttcggcgtcacatttcaaaagatgagacgacaagtgatctagcaacaattgttgcacaaagattattagcaaaagcaaacttagatgctgaggaaattgatttcatcgttgttgctacgattactccagacagcttaatgccatcaactgcagcccgagtacaagctaatattggagcttctcgagcttttgcatttgatctgactgcagcatgtagcggatttgtatttgcattagccactgctgaaaaatacatttcttcaggaatgtatcggcgaggaattgtgatcggtagtgagacgctttcaaaagtattagactggtcagaccgttccacttcagtcctttttggagatggagctggtggtgtcttgcttgaagcgagcgatcaaaattcgtttttggctgagaatctttttacggatggtagccgaggtgctagtcttgagtcttgctatttgggtctgtcttccccttattcagatgacgtttctgatcgaagatatctgacaatggacggacgggcagtttttgattttgccattcgtgatgtcacgaaaagtattcaaaaaattatagcagacgcctctatggaagcagaagagattgactattttctgttacaccaggcgaatgaccgaatgttagataagatgtcaaaaaaactgggtgtctctagagagaaaatcccagcaaatatgatggaatatgggaacactagtgctgctagtatccccattctattatcggagtgtgtcgagaatcatcgaatcaagatggatggaagtcaaaaaattcttctgacaggattcggtggaggtttgacatggggcacacttcttgttacaatctagttaaacatgtggaaacacattttaaaaatttatatattattttttaaggaggcctatcatggcagtatttgaaaaagtacaagaaattatcgttgaagaacttggtaaagaaccatcagaagtaactcttgaatctacattcgaagatttagaagcagattcattggatttgttccaagttatctctgaaattgaagatgcttttgacatccaaatcgaaactgaagaaggattgtctacagttggtgaccttgtcgcttacgtagaagaaaaaacaaaataatgatagatgagagtatcgaaagatattctctcttgtttaggtaatagtttgaggctcaaagaaacaatcttttaaactcaaactattacttaagcgaaaaaagaggtaggtataatgcaaacacgaattactgaactattgaatattaaatatccaatcttccaaggtggtatggcctgggttgctgatggagacttggctggagccgtttcaaatgctggtggactcggaattattggtggtggtaatgcccctaaagaagtggtaaaagctaatattgatagagtaaaacaaatcactgacaaaccattcggtgttaatatcatgcttttgtcaccatttgcagatgacatcgtcgacctcgttatcgaagagggtgttaaggttgttacaacaggtgccggaaacccaggtaaatatatggagcgtttccacgaagctggaattacagtaatcccagttattccatcggtagcacttgctaaacgtatggaaaaacttggagctgatgctgttgtcgcagaaggtatggaagctggtggtcacattggtaaattgacaaccatggcacttgttcgccaggttgcggatgcggtatctatcccagttattggtgctggtggtgttgcagatggacgtggtatggctgctgttcttatgcttggagcagaagctgttcaggttggtactcgtttcgctgttgctaaggaatctaatgcacaccaaaacttcaaagataagattttgaaggctaaagatattgatactgttatttcagcctcagttgttggacacccagttcgtgcgattaagaataaattggctacagaatataaccaagctgaaaaagatttcttggctggtaagaagactcaagaggaaattgaagagcttggtgcaggtgcccttcgtaacgctgttgttgatggagatgtggaatatggttcagttatggctggacaaattgcaggtcttgttcgtaaagaagaaacatgtgcagaaatcttggaagacctttacacaggtgctgccaaggtgattaaagaagaagctgctcgttgggcagatgtaaacgtctaaaaacgtcgaaaggattaggatagtgacaaaacgtgcgttcttatttgctggtcaaggggctcagaaattgggcatggcgagcgatttgtatgcggcttatcccgttgttaaagagacatttgatacggctagtcgtattctaggctatgatttgcgtgaattgattgattctaacgaagaaaaactgaatcagacacgctatactcaaccagctattttgacaacgtcagtagccatttatcgtctcttagtagaaaatggtatcactcctgatattgttgccggtctctctttgggggaatattctgccctggttgcggctggagctctttcgtttggagatgcagtagctttggttgcgaaacgaggtgaattcatggaaacggcagctcccgctggaagtgggaaaatggttgctgttatgaatacagatccaagtttgatcgaggagatttgtcaacaagcatccgaaaagggtgtagtaacaccagctaactacaatacgccagcacaaattgtgattggtggtgaggttgcggctgtggactatgctgtggaactattgcaggaagcaggtgccaaacgcttgatccctttgaatgtgtcaggtccattccacacagccttactggaatctgctagtcaaaaattggcggctgaactagaaaaagtatcatttaatgattttgatcttcctttaattgggaatacagaagctacgatcatgaagtcagaagatgtgaaagcacttttggcccgtcaagtaaaagaaccggttcgtttctatgattcaattgctacgattcaagaatttggtgtagatgaggtcatcgaaattggacctggaaaagtcttgtcaggattcttgaagaaaattgataaaactcttccaactcataacgtcgaagatcaggctagtctagatgcacttctgaatgcttaaaacgaggtaaagatggaacttaaaaataaaaatgtttttgtaacaggttcaacacgcggaattggattggctgtggctcataaatttgcgagtctcggtgctaatgttgtcctaaatggacgttctgaaatttctgaggacttgcttgcacagtttgctgactatggtgtgactgttgttggtatttctggggatatttcgaatggcgaagatgcgcaacgtatggttgctgaagctattgaaaagcttggtagtgttgatgttttggtcaataacgctgggattacaaacgacaagttgatgttgaagatgactgaagaagattttgaacgggttttgaaaatcaacttgactggtgccttcaatatgacacaagctgtcttgaaaccaatgtctaaggcgcgtcaaggggccatcatcaatatgtcctctgttgtaggtctcatggggaatatcggtcaagctaactatgcggcttcaaaagctggtttgatcggtttcactaaatcagtagcgcgtgaagttgcggcccgtggtgttcgtgtgaatgccattgcacctggtttcattgaatcagatatgacagacgctattccagagaaaatgaaagatgccatgctagcgcaagtgccaatgaaacgaattggtcaagctgaagaagtggcagaagttgcggctttcttggcaggtcaagaatatttaactggtcaaacaattgccattgatggcggcatgactatgcaataatgaatgctcactgatcgaaaatcactcaaaaggagaatatatatgtctacaaatcgtgttgttgttacaggttacggtgtaacctcaccaatcggaaatacaccagaggagttctggaatagccttcatgaaggaaaaattggaatcaagcccattacgaaatttgatgcttctgaaattccagtctttaatgctggtgaaattcaagatttcccattcgataaatatttcgtgaaaaaagatcaaaatcgtatggatacttactcattgtatgcaatctatgctgcgatggaagctattgaaaattcaggcttgaatatggaagaagaagaccgcgatcgtgtaggtgtgattgtctcatctggtatcggtggtttgcaagaattggaagatcaaattatccggatgcatgaacgtgggatgaagagaatccaaccaatgtttattccgaaagctctttcaaacatgggtgctggaaacatcgcacttaagattggggctcaaggggtatgtaaatccgtgacaactgcttgtgcttctgccaatgatgcaattggtgaagctttccgtgaaattaaatttggtatgcatgatgttgttttggcaggtggtgctgaagcttcgattactaagattggtatcggtggtttcaatgcccttacggccctttcaacaacggaagacccagaacgttcatctattccatttgacaaagaccgtaatggttttgtgatgggggaaggtgcaggggttcttgtcatcgaaagtttggaacatgcccaaaaacgtggtgctaacattttggctgagattgttggttatggttcaaactgtgatgcctaccatatgacaacaccgacaccagatggttcaggtgcggccaaagcaattaaattagcgatcaatgaagctggtattaagcctgaagacgtcgattatgtcaatgctcatggtacatctacacctgccaatgagaaaggtgaaagcggagctattgtttctgtacttggtaaagaagttcctgtatcatctactaaatcatttacaggacacttgcttggtgccgctggtgcagttgaagcgattgctaccatcgaagcgattcgtcacagctttgtaccaaaaactgctggtactaaagaattgtctgactatatcgaagcaaacgttgtttatggtgaaggccaagaagcggatattcagtacgctatctcaaatacctttggttttggaggacacaatgctgttctggcctttaaacgttgggagggttaattcatgaatatttctgaaatcaaagatttgttggctcaatttgatgcgtcaactttgcgtgaattctcatataaaaataatggcgaagaattgaatttgagtaaaaatcaaacggcttcagttgcgactacaccggtagctcctgcagttgaagtggtagcaacacctcaaactcctgtcgtagcccctgttgttgaagcaccagcaactccagctgtagcagctgaaccagttgctgctccagctcaagaggccgaaggtgatgtcgttgaaagtccattggttggggtggcttacttgtcaccagctccggataaaccggcctttgtatctgtaggagataaggtcactaagggtcaaacactcttgattatcgaagccatgaaagtgatgaatgaagtcccagcacctaaagatggggtagtcactgaaattttggtaatgaatgaagaaatggttgaatttggaaaaggattggttcgaatcaaatgacaattgatattaatgctattcgtgaggctttgccgcatcgttacccaatgcttttggtggatcgcgttttagaaacaagcgaagatacgattgttgctatcaaaaacgtgacaattaatgaaccgttttttaatggacattttccacaatatcctgttatgccaggtgttctcatcatggaagctttggcacaaacagcaggtgtactagagttgtcaaaacctgaaaataaagggaaattagtcttttatgcagggatggacaaggtgaagtttaaaaaacaagtcgttccaggagatcaactggtgatgacagctacttttgtcaaacgtcgtggaacaattgctgttgttgaagcgaaagcagaggtagacggtaagcttgcagcttcaggaacacttacttttgcaattggaaattaagaaaggcctatctatgtttcgtaagatcttaatcgccaatcgtggtgagattgcagtacgcattattcgtgcggctcgtgaacttggcatcgagacggttgcggtgtattctactgctgataaagaagccttgcataccttactagcggatgaagcagtctgtattggacctgctaaatcaacagaatcttatttgaatatgagtgctgtcttgtctgcagctgttttaacaggtgcagaagctattcaccctggttttggatttttaagtgaaaactcaaaatttgcaaccatgtgtgaggaagttggtattaaatttatcggcccttctgctaaagtcatggatatgatgggggataagattaatgctcgtaaacagatgatcaaagcaggagtacctgttattcctggatcagatggtgaagtttatacagctgaagaagccctcgaaattgcagagcgcattggttaccctgtgatgttgaaagcatctgcaggaggcggtggtaaaggaattcggaaggttgaaaaaccagaagatttggttgctgcttttgaatctgcttcctcagaagctcaagctgcttttgggaatggtgccatgtatatggagcgggtgatttatccggcacgccacattgaagtacagattttagcggatcagcatggacatgtcattcacttaggtgaacgcgattgttctctccaacggaacaatcaaaaagttctagaagaatccccttcaattgctatcggaaaaactcttcgtaatcgtattggttctgcagctgttcgtgcagctgagtcagttggttacgagaatgctggaacgattgaattcttgtatgatgaaggcaagggtgagttctactttatggaaatgaatactcgcgtgcaagtagagcatcctgtcacagaatttgtaacaggagttgatatcgttaaggaacagattaaaatcgcagctggccaagaattatccgttactcaagaggatattgtcattaaaggccatgcgattgaatgccggattaatgcggaaaatccttcctttaactttgcaccaagcccaggtaagattactaatctctatcttccaagtggtggggttggcctgcgtgtggattctgctgtgtatcctggttatacgattccaccatactatgatagtatgattgctaagatcattgtccatggggaaaatcgctttgatgcactgatgaaaatgcagcgagctctttatgagttggaaatcgatggtgtcacaaccaatagtagtttccagttggatttgatctcagattcgcatgtgatcgctggtgattatgacactgcatttttgatggaacaattccttccaaattataataaggaatgatgaagagcctggacttgtgagggaagtatgaacatcatcctcacagtttcaggcttttatagtaatgctacagatgctgtagcatattataaggagttagtaatggcattattttctaaaaaagataaatatattcggatcaatccgaataggtcagcctggaaagaacctcagccaaaacctgaagttcctgatgagctattttcacaatgtccaggttgtaaacataccatttaccaaaaggatttaggtagtgaacgggtatgcccaaactgtggctatactttccgtatttctgctaaagaacgcttggcgcttacagtggatccagctagctttgaagaaatgtttactggaatcgaaacgacagatcccttgaattttcccaattataagaagaaactagcagcagtacgagaaatgacaggactggatgaagctgtactgacaggaactgcattgattaaagggcaaaaagttgcgcttgggatcatggattctaactttatcatggcttcaatgggttctgtagtaggtgaaaaaattacacgattgtttgaatttgcgacaaatgaaaaattgccagtcgttctctttactgcttctggtggtgctcggatgcaagaaggaatcgtgagtttgatgcaaatggcaaaaatttctgcggctgttcaacgtcattctaaagaaaaattattctatttgacggtattgacagatccgacaaccggtggggtaacggcttcatttgctatggaaggtgatattatcatggcagagagtcaggccttggttggttttgccggtcggcgcgtgatcgaatcaactgtgcgtgaaaaattgccagatgatttccaaaaagcagaatttctgcaagaacatggatttgtagacttgatcgtggagagaagccaaatccgagcaacggttggacaattattggcccttcatggaggtaaacatgagtaaaataacacagattattaaagaggcacgtgaccaaggaagattgactgcgcttgattttgctcaaggaatttttgatgattttatcgaattacatggagatcgaaacttccgtgatgatggtgctgtgattggtgggattggacgcttaggcgatcaaacggttacagtcgttggaatccaaaaaggaaaaaatcttcaagataatctaaaacgtaattttgggcaaccacatccagaaggctatcgaaaagctttgcgcctcatgaagcaagcggagaaatttggtcgtccagttgtgacctttatcaatacagcgggtgcttatcctggtgttggtgctgaagaacgaggacaaggtgaagccattgctcgcaacctcatggaaatgagtgatttaaaagttccaattattgcgatgatcatcggagaaggtggttctggtggtgccttggctcttgctgtagcagataaggtctggatgcttgagaactccatctatgcggtcttgagtccagaaggttttgcctctattctttggaaagatggaagtcgtgccatggaagcagcagagttgatgaagattacttctcacgaattgttaaatatggaaattgtcgataaggtaattcccgagcatggattttcaaatggagaactactggctcaagtgaagaaggaattacaggaagagttaaaggttttacaagccttacctctcgaagagcttctggagcaacgctaccaacgttttcgtaaatattaaaaaactgagcttgcaatttgcaagactcagtttttttaaactttattttggtgcgatgacttcagctccacccatgtatggacgaaggacttctggaatggtcacagaaccgtcttcgttttggtagttttcaagaatagcagcgacggtacgtccgacagccaacccagaaccgttcaaagtatgaaggagttttaccttgccatctgcttcatcacggtagcggatttgcgcacggcgagcttggaaatcttctgtattagaacagcttgagatttcacggtaggtgttttgcgctgggatccatacttccaagtcataagtcttggcagctgagaagcccatgtctccagttgagagagctaccactcggtatggaaggttcaatttttgaaggatattttcagcattgacaaccattttttccaattcatcatatgattcttctggtttggaaaatttcaccatttcaaccttatggaattggtgcaaacggatcaatccacgagtatcacgaccggctgaaccagcttctgaacggaaagatggactcatagcagtgaagtagattggaagatctttcccatcaagaatttcatcgcggtagtagtttgtcaaaggaacttcggctgttggaatgaggacataattggtatcgctaagttcaaaagtatcttccttgaattttggatactgaccagtaccaaacatagaatcatggttgaccatgtaaggagggatgacttcagtgtagccttccttaccatgttcgtccaacatgaagttgtagatggcacgttctaagcgagctccaagtcctttgtagaagaggaaacgagcaccagtgactttagccccgcgttcccagtcaaggatatcaaggttttcgcctaaatcccagtgagcttttggttcaaagccaaattcgcgaggtgttccccaacggcgaacctcaacgttgtcatcctcatctgctccaacaggaacactgtcagcaggtatgtttggaagggtagtggtgaattcagtcaatttcgcatcgatttcagctaattctgtatccagagctttgacttcagcagagagggtttgcatggcagcaatcttatcatctgcattttccttgttacgctttgcttgtgcgatttcagcagatacggtgttgcgctctgctttgagattttctactttgactaagatgtctcgacgtttggcatcgatttctttcatttcattcaaaatagctgcatctacgccacgtgttgccaattttttagcaaccgcatcaaagtctgtacgaatccgtttaatatctaacatagcttctcctttaacaaaaaacacacctgttacagtgttggagtggcagagccacggttccatccaacttcacaggtgtgcacttgattcaatattatattttaactaaacggtagaatttcaattaagatttctatctgctcgcagcaaccgcagactttctgaaagagcgtcttaacttacttatccgtttgcgtctattatacaagaaaagatcctattttgcaaatagatttttaattttagccgtgatggtttggatcaatgtaggaagtttgacaattttatcatttcctagatgttcccgagcaatctttaaaatttttccagagtcttttgaagcaaagagaaattttgattctctggtatagatttcaaaatggcggctaattttacgtccggatacattggctccgatttggtcgatttcttgccagggaatttggatgtagtcttcaacattagcatccgcataaaattcaaaagcggcattccctactaagatttttccaacctttccacccactccaaggtaagaaacccctgtagtatggaattcaacggttttattcaatgattgagccatgagatcctcctgtattgttattcatttattatatcataataaaaagaaggccgaaaccttcttttcttgcactttgattacatcaagcccgcaacgtgtgctaatacaccgattacaaagagggcgataatgatagtgataggagatacttttttcttcaacaaccacatgcaggcaaaagtaagaagcaatcccatcaatccaggaatcaatgaatccaagttttgttggaaagttgtaactttttcaggtgtttgagataggcctgaaccaacttgagcgaaggcttcttggatacccttgtatccttcaggaagtttatcccagtggatataagctttgtcgtctaatttgacagaagaaacattaaagatgaatttaatagatacccaacgttctaccaagacagcgaggatgaacatcccaaggatagaagctcctttagtgatgtcttgcaagatcccaccagacatatctttggtaatttcagaacctgctttgtagccaagttcttgcgtgtaccacaagaaggccatacgaatcgcattccatgcgataaagaagatgagtggaccaaggatattaccagacgcagccagtgatgcaccaagggcaccaaggataggacgtactgtaaaccagaagactggatctccgatacccgccaaaggacccatcataccaattttaaccccttggatagctgcatcatcgatcgcagcaccgtttgctctttcttcttcaagagcaagtgttaccccgatgataggagcagcaacgtatgggtgagtgttgaagaattccatgtgacgttcaagagcagccgcttggtcttctttcttcgtgtagagttttttgatagctgggatcaatgagtatgcccaacccaagttttgcatccgttcatagttccaagaaccttgcaagaaggttgaacgccaccaaactttttgacgatctgatttagataattgtaatttttcagtcatgatagtgtcacacctttcttaatagtcttcgagaatgtcgccgattggatcgttagaagtagcggctccgccacctccattgccacctttcttagaaagagtaaggtagatcaaggcaagggcaacaccaatcgctccaagagcgatcaaagttaattggctaacagctgcaagtgcaaaaccgatggcaaagaatggccatacttcacggctagccatcatgttgataaccatggcataaccaacggctacaaccataccaccaccgatttgcattccatcagcgagccattttggcattgcttcaagagcagttttgacagtttcagcaggaatcatcaacaaaagggctgcaggaatagcgatacgaagaccttgaagaagaagagccacaaaatgagcgcgttctacacctttgatatcaccttttttagcagcagcatcggcagtgtggaccaaaccaacggaaagggtacggacgatcattgtcaagaaaagaccagcaactgcaagtggaatagcgacaccttgagcgacagcgattccttttgcactgaagtctcccccaagtaccatgatgatggcagcagcgacagatgcaagggcagcatcgggtgcaaccgcggccccaatgtttgcccagccaagtgcaataaattgaagtgaaccaccaagcataatgccagcagtcaaattacctgttaccaaaccgattaaggtacaagcaacaaggggttggtggaattggaattggtcaaggataccttcaagacctgctaagaaggcaacaacgaccactaataccatagaaataatagacatgtttaaaatcctttcgtaagtaatcgattattgaacgttagctttgttaattaagtcaaacaaatctttcttagagtcatttggcactttacggacgtcaaattctactccaagatcacgcattttttcaaatgtagctacgtcatctttatccattgacaacacattgttaaccatggttttaccagttgagtgggccattgaaccaacgttcagggttttaatcggaacaccaccttcgatggcgcgaagagcatcttgaggtgtttcaaataagatcaaagcatgggtatttccaaaacgtggatcttttgcaacgtcgatcaatttttgaattgggacaacgtttgctttcacaccatttggtgccgcttgtttgatcaattccttacggagttcatctttggcaacagaatctgaagcaacaatgatccgatcggcttttgaatcaggtgtccaagcagttgcaacttgtccatgaagaagacgtgtatctaagcgggcaaggttaatcttgagttttccatctccgataactgttccttctggaatagcagcttgggctacaggagcagcagcggctgtactagcttcttcaacaggattcaattcttctggaagagctttgacaccgtcttttgcttccttgatgatgtttgcagcgacttgatcaacgccggcatttgcatccatcaaacgctctgtataagcttgaatcaacatcggaaggttcaatcctgtgatgatcgcaaatttacgatctggattttctcccatgacgcgacttgcttggttaaatggagaaccactccaaaggtcagccaaaaccaagacttcatcttctgcatcaaatgcggcaacagctgcattaaatttagcatagagatcatccgggccttcacttggcatgaacgtaaccacttgaactttctcttgatccccaaagatcatcgagccggattggtggattccagctgcaaattcaccgtggctagcaataatgataccaatactcattattgacattcctccttataaaatttgtttgactttcagtttaagaaaactttaagctactttattataaatcgttttcacacttaagtcaatttttctatcaaaatctcgatataaaaatattaacttgttatattgagttatcgttagataaaaattgaatgctattgaatggttctcgtttattagttgatgatggcagaagaaatatatgatagatgggtttcataggatttgaatttcaataaaaagattccaacaatcgatctatatctccaaaaataaaaaataaatatataataaattgtaaaatagagtgattgagagcactcaaaaaagactagcccagttgggctagtcctgtaggttcagttgtttagtttgtaaagtcaagtaccatacgtccttgaatggttccagcttccatttcatcaaagactttgacagcatcttctactggacgtttttgaacgacagggactaccaagccttctgcacccaattggaaagcttcttccaagtctttacgagttcctacaagagaaccaatgacttggataccatctaatacagttttcacaatgctgaggtccatcatttcagaaggaagaccaactgcgacaacgcggccacctgcacgaacagaatctactgcttggttgaaagctactttagaaacagctgttacgacagcagagtgagctccaccatttgttttttctttgatcaatcctgggacatcttcaacttcgcgaccgttgatgacaaagtctgcaccaatttctttcgccaattctagtttatcattgttgatatcgacagcgatgacatgtgcgttgaagactttcttagcatattgaatacccaagtttcctagtccaccagctccatagataacgatccattgtcctggttcagctttggcttctttgatggctttgtaagttgtaacacctgcacacgtaatagaagaagcttgggcaggatctaatccttcaggtactttcactgcataatctgcagtaacgatacattgttcagccattcctccatcaacagagtaaccagcatttttaacagtccgacaaagagtctcgcgaccagttgtacagtattcacaagttccacatccttcgaagaaccaagcaacactgacacggtcaccaactttaaggctcttaacatctggagcaacttctttaacaataccgattccttcgtgtccaagaacacggcctggaactttaccgaagtctccatgtgcgacgtgcaagtcagtgtggcagacaccacagtattcgatttgaacaagagcttcccctgtttcaagtggtcgcatttctttgttcgcaacaatttcaacaccggtaccttctggatttacaacaacagctttcattttgttcctccttaagtgaacgagaagcggtttagaatttttgaaagcgcttctttaataactatgttaataatatcacaaacttatctattgaacaataaaaaaatgggaaaaaagggaggtattgattaaccgattaaggatttaggggacaaaaagacatgagggcgtaactcatgtctgtcaatattataagaataattgtattaattggcgcgcgacaccatcttcattattcgtgaaatcagtgatggagtctgcataggggagaaggacggagctggcatttttcatagcgtatccatgaccggctagagctagcatgtcggtatcgttgtgctcgtctccaaaggcaatcaaatccttctgatccatattgagtttatccagaaggtaggtcagagcagaagctttggtcacattttttggattgcattccagaatatttaagggaccaccccaagtattgatagacagattgtagtcataatgccgattcatttcatctgccagagcatatttgtcttccgctttcgtttgaaagagaatacagtttgggtcgctcgttacccgttcggggttgaattgattttctggttggaaagattcaataccgaatagtttagggtctgcaacgtgctcatttggatcggtaataaagaatttattgcggtattcgccagcgataaagtctgcctggatggtatcccggttggcgaccatatctagcaggtattttttatctaaagtcaagcattgttcatccacccattttttctctgggagatgcgttagggagccattaaaattgatcatcggggtatctagctccaattgtttgtaataggtatgtgccatgcggtagggacgacctgtcgtaataatgattttatggccaagggaactaatctttttaatcgtatcaatggtaaagtcgctcaatttgctttcggaattcaagagagttccgtctagatctagagcgatcatttttttgtgcatattttggttcctttcgaggagaatgagaccattatatcagaaaaatcggaaaaccgcttaaaaatagagaagagaagcgggatttcttgaaaggcgaaagatcttttggtagaatagatataacgttcgcaaattgattgggagcgagaatgataaaaaaggagtttattctgaaatggataagtttttcaaactttcagaacatggaaccactgttcggacagaggttcttgctggtttgacaaccttttttgcgatgagttatatcctcttcgtaaaccctcaaatgttgtcacaaacaggtatgccagctcaaggggtcttccttgcaacgattattggatccgttgtcgggaccttgatgatggctttttatgccaatttaccttatgcacaagcaccaggaatgggcttaaacgctttctttacctttaccgttgtatttggtatgggctactcatggcaggaagctttgggaatggtcttcatttgtggtgtgatttcattaattatcacattgacaaatgttcggaagatgatcatcgaatcgattccgaccgctcttcgctctgctatttcagcggggatcgggattttcttggcctatgttggaattaagaatgcaggatttttgaaattcacgattgaccctcatacctatacagtggtcggagaaggggcagataaggggaatgcaacgatctcagccaatgcatctgctgttccaggcttggttgattttaacaatccagctgtcctcttggctcttgttggtcttgcgattaccatcttctttgttgtcaaagggattaagggaggcattatcctttctatcttagtgacgactgtgcttggaattctcatccatgttgttgatatcactaaaattgactttgcaagtaaccatctaggagctgcctttaatgatttaggcacgatctttggtcaagctttaggatcgaaaggattgggttcgttgatttccaatacgtctcgtttgcctgagaccttaatggcaatcttagccttctccttgaccgatatttttgatacaatcggaactttgatcggtacgggtgaaaaagtcgggattgttgcgacaaatggggaaaatcatcaatcagcgaaattagataaggccctctattcagacctagtagcgacttcagtcggagccattgcaggaacttcaaatgtaacgacttatgtcgaatctgcagccggtattggagctggtggacgaactggtctgacagccttggttgtagcgatctgttttgctatttcaagtctctttagtcctttgttagcgattgtaccgaccgctgcaacagcaccaattttgattgttgttgggatcatgatgttgagtggcttgaaaaatatccattgggaagatatgtcagaagcagttcctgctttcttcacctctatctttatgggcttcagctactcgattacacaagggatcgctgctggatttatcacctatagcttggtgaaagtggttaaaggagaagctaaagaagtgcacagcatgatttggattttagatgttctctttattttaaactacgttagcatggccttgaattagttttcagggaaatattcaaaaaggaatggggtgactcccattcttttttggaaggataaacaaagtgttcaaacaggagtttatgggagaaacttgcttttttccctagaatttcccatcacaagggggctttactcgaacattttttaaaagtaagagcagaatttaaaaaagtttgatataatagaggaatgattagtcacaatgaaatggagctgatcgctctaggaaaacagctaggaaaactcttagaaaagcaagacgtaatcatcttatcaggtgatctaggggcagggaaaacgacctttacaaagggaattgcaaaggggttagggattgatcagatgattaaaagcccgacctataccattgttcgtgaatacgaaggccgcttgcctttataccatttggatgtttaccggattgggaatgatccagattctattgatttagatgattttctatttggagatggtgctaccattattgaatggggagagctgattgagccgagtctctcggatgcttatctaaaaatttttatccgaaaattggaagaggggcgagagttagcttttgaagctcatggagcgcgtgcagagactttactaacatcctttgagcaggtgggaaaaacggatgactaaggaaaaggaagtgacattagaaattcggcaagctgaaagtgcagacgcggctcttgtcgttgatttcttaaatcgagtcgggaaagagtcagattacatgacgctagatgaagctgggattggcatgtctccagcagatatggagcattttctaacggtgcaagagatggcggataaccggatttgcctcttgctatttctagatcaggaactggcggctttgttaaatattactgcagcttctcaacggtccattcagcatattggtgatgtctttattgtggttcaaaaagcttattggaatcaaggacttggacagatcttactggaagaagggcttgagtgggcacactcgactggtcttcttcgcaaactagtcttgaatgtccaagtacgtaatgaacgggcgattcacctgtataaaaaattaggttttgaaatcgaaggttgccaagctcgtggagcttgttcagctgaaggagaattcttagatgtttaccttatggggaaactgatagattagagagagattctatatggttaaaaagattattttgatgtttttgagtttattgacggtaacagtgattggggttggagcgtatggtcttaccatccttaaccaaacgactggaactctcagtaagacttataagggctttggaaatgagaccaatgtcattgcagaaaacaagccaatgactatccttttgatgggggttgatacaggtagtggttctcgggaagatccttgggccggaaatagtgataccatgattttggtgactgtcaatcctcaaacaaaagaaacaaccatgacaagcttggaaagagatatcctaaccaatattacttcagatggcgaaacagtccaagcaaaattgaattcagcttatgctcaaggcggtgccaaattagccattaagactattcaagatcttttgaatatccatattgaccgctatgtcatgatcaatatgaaggggttggttcaattagtggataaggttggtggcatcacggttaacaatccatttgacttcgatatctcgatcgaggaaaatgagccagaatatacggctaagatcgcaccaggacgtcaggagattaatggggaccaagcactcgtttattcacggatgcgctaccaagacccagaaggagactacggacgtcaaaaacgccagcgtgaagtgatcaaaaagattgttgagaaagttttaagcctcaatagtttgagtcattacaaaggaatcattgagtctgttagtgacaatatgcaaaccaacatttcacttgatagcaacagtcttcttcaattgttaggatataaagatgccctttcaacgattcatcagtaccagctgaaaggagaagatgccaccttagcagatggcggaagttaccaaattgtgacttcaaaacatatcttaaaaattcaaaatattatccgcaaagctttgggtatgaaagaaataaaaacattgaaaaccaatgcttatctgctggatgggaatgatagtttgaaggagaactcttctcaagttgatagccaagttccagcatctgaggaagctccagtataccaagatttttatcaacaaccggttgtcccatcgagccaggatacgggagtggtgacacctcaaagttctgttgcaccagtgacaccagttgctcctgcagctacagagtcgagcagtgtgacacctgcggtaccttcagaataagaaaaaacgattgagtcttctcaatcgtttttacctggttgccagatatcttgaatttcttttagagaggctgttgcttgttgacgaaacagtttggtcttgtattggaaatccgttaccaattcttgaagattggtcttttggtcttggataatatccagattgcgttggatttttgctaggttatcttgaattcccatgaccaattggctggattcagtcacctctgttttgatttctttgcgattttttaccaggtggtagctaatgctagctcctgttgcaaaccaaaagagattttttagtttcatatggcctcctttttaactgtttttgatggtttctgcgagaactgctagttgttcaaaattaggctcgtgttcagtaaatgaaatggcaagctcatcttgatcggaatagcgagggataatgtggacatgtgtgtgaaaaacggtttgtccagaaacttcttccatgttgctgatgatattcattcccttagcttgggtagctgtttctactttttttgcaactttagagacacgtgcaaatagttgagctgtggcggtttcgtccatctctaagaggttgcgagcgtgtttttttggaaccactaacgtatgccctggtgtaacctgagagatgtccaaaaatgcgaggacttcctcgtcctcatagactttggaggaaggaatgtcgccagctataatcttacaaaaaatacaatcgtcaaccataaatacacctcatttagactaaattttgttataatataagaacattataccagaaattggagaaaatatgttagaaatcaacaagttgacagggggctatgtcaacatccctgtcctgaaagaggtgagtttttcagttccggatggccaactgattggtttgattggactaaatggagctgggaagtcaaccacgattaatgaaattattggtctcctgcatccttatgctggggaagtacggattgacggcttgagccttccagaagctccaactgactatcgtaaaaaaatcggctatattccagaaacccctagtctttatgaggaattaaccttgagagagcatatcgagaccgtagctatggcctatgatttagacatagctcaggtcatggggcgcgtccagcctttgttagaacgattccgtttggctgaaaaattagattggttcccgacccagttttcaaaaggaatgaagcaaaaggttatgattatttgcgcctatgcagtggatccaagcctttatattgtcgatgaaccctttttgggattggatcctgttgcgattgcagatttgattcagttattggcagatgagaaagcaaaaggaaaatcgattttgatgagtacccacgttctggattcggctgaaaagatgtgtgatggttttgtaatcctccataagggtcagatccgagcacaagggaccttagatgagttgcgttcaacttttggagatgagaaagcaagtctaaatgatatctacatgaccttgacagaagaggaaacagcatgaaagagttgatgaaaaaacggcaacaaacgtttcgaactcaatgtgtaaaatatagccgctatgttctcaatgatcatttcgttctctttatgctgattttcataggatttctggcggttcaatacagccaattcttgcaagatctacccaaagatacaagcctgatccgctggagtctcttgattggtttgctcctcttggttccgataggctctattgcgacctacttagagaagcccgatgccttattccttttagtaaaggaagaggaagtgaaacgttatatcaaagggcaggccaagaagtcttttgtgttttggtttttgattcaaagttttgtccttctattatttgttcctcttcttcttgcatcggggctggataaacttgctattgtagcttatatccttgtcttaggggtggctaaaggggctgtttttagctggaaggaagcgcgtttctaccaggatggaaatttaaattggtccttggccattgttcgtgagaatgcaaggaaacaattgatccttcgtttctttgccttgtttacaacggtgaagggcattaccaacagtgtcaaaagaagagcttacttggatggtttcttagggtttcttcccaaaacacatgggaatacttggctttacttatatatgcgctccttcttacggaatggagatcttttctctatgactctacgactcttggctctttccattcttgctatcatctttattccccagcctctcgtagtgattgcccttgtagccttgctcaattacttggttatttttcaattactggggctttacagtgcttttgattaccaaccgttgaccctccttttcccgatgaaaaagggcagtaaaaaggcagggttgaacaaaatgattcagctggtcatgagcatgataacggtgatagaaggggggattggcctggtctttatttcagataaagtcctgttgttgggcttattggcttatacagttgttttaaccctgctttatcttccatttaagatgacgcgcttggttgacgaaaatcgttaaaattagtaaaatagattggaaactttttacggaggaaaagatggactcgaatgaaaaagagctaagcctcaccccgattcctgggaagagtgggaaggcctacatggggacttacccagatggcgggcgcgtttttgtaaaaatgaatacgaccccaatccttgcgggtctagcaaaagaacagattgctcctcaattgttatggagtcgccgcttgccggatggaaatgtgatgagtgcccaagaatggttgaatggggaaattctaactccaaatggaatgtcgaaaaagcaagtggtcaatattttaacgagattgcaccgatctagacctttgatgacccaattaaagaaacttgggtatcctgtggaatctccgttagagttgctcaattcttggagcaaccatttgccaattgccctacgtcagaaccactatatccaatcagtcgtaaagaatttacgtaagacagtgcctgcctttcgagaggattatgcgacgatcgtccatggagatgttcgtcatagcaactggattgagacagagagtggcttgatttatctagtcgattgggactctgttcgtttgacagaccggatgttggatgtggcgcatatcttgagtcactatatcccagattctaattggcgcgattggttaggctattatggctacaagtacaatcaaaaagtatttgataaactctattggtttggtcaatactctttcttgtgccaaattgctaaatactatgaaaataatgatttagaaaatgtcaatcgcgagatctatgctctgcgcaatttccggttgaaatatggaaaggaaatatgagagttagaaatcgcaagggagcgactgaattattagaagcgaatccgcaatatgtggtcctaaatccagaagatgccaaggggaaatggcatgagattttcgggaatgatcatcccattcatattgaagttggaagcggaaaaggggcctttattactgggatggccaaggccaatccagagatcaactacatcggaattgatattcaaaaatcggtcttgagttatgccttagataaggtcttagaggctgatgttcctaacattaaattactttgggtagacggggatagcttgaccaactattttgaagatggagagattgatcaactctatctgaatttttcagatccctggcctaagaaacgtcatgagaagcgtcgtttgacttacaagaccttcctagataccttcaagcaaattcttccagaacatggggagattcactttaaaacagataatcgaggtctgtttgaatatagtttggtgagtttttcgcaatacggtatgactttgaaaggagtctggctagaccttcatgctagtgattttgagggtaatgtcatgacagaatatgagaaaaagttctcaagtaaaggccaggtcatttaccgtgtagaagcacagttttagcatattccttgcaatcattggggaatcgtgttataataacctaaatgaatagaaaaggagaggcggggaaatatcttcgcctcttatctatgaggaggtggcaaccatcgcaacaattgttgacttagtaacagaagtgattcagccagctataaaggaaccatttgaattggtcgatgttgaatatggcaaaatgggtggtgactacgtcttaagcattttcgtagacaaaccagaaggaatcacactgaatgatacagcggatttgacagaaatcattagcccgctattggatcaaatcaaaccagacccatttccagaacagtacctcttagaggttaccagtcctggcctggagagaccattgaaaaccaaggaagcactcgagggagctgttggcaagtacgtcaatatcagcttgtacaaggctgttgaaaagcaaaaggtctttgaggggaatttggtaggttttgaagaggatgttttgaccattgagtatatggataaaacacggaagaaaacagtggatattccttataaccttgtgtccaaagcaaggttggctgtaaaattgtaacagaatgaaagaaaggatgcctttatagtagaggcaagaaaaacatgagtaaagaaatgctagaagccttccgcattttggaagaagacaaagggatcaaaaaagaagatatcatcgaagccgtcacagaatcattgcgttcagcttatcgccgtcgttatggacaatcagaaagtgcagcgattgaattcaatgaaaaaactggagatttccgtgtttatacagttcgtgaagtggtggatgaagtctttgatagccgtttagaaatcagtttgaaggatgccttggccattagttctgcttatgagttgggggataagatcaagtttgaagaagcaccagctgaatttggtcgtgtagcagctcaatctgctaaacaaacgatcatggaaaaaatgcgtaagcaaacgcgcaccatcacctataacacttataaagaacatgaaaatgaaatcatgagtggaacggtggagcgctttgacaatcgttttatctatgtcaatcttggttcgatcgaagcacaattgtctaagcaggaccagattccaggagaagtgttccaatctcatgatcgaattgaagtatttgtctacaaggtagaagataatccacgtggtgtcaatgtctttgttagccgaagccaccctgaaatgatcaaacgtttgatggaacaagaaattcctgaagtatatgatggaactgttgagattatgagtgtagctcgtgaagctggagatcgtacaaaagttgcggttcgtagccataatccaaacgtagatgcgattgggactatcgttggtcgtggtggatcgaacattaaaaagattaccagcaaattccacccagctcgatacgatcaaaaattagaacgtatggttccgacggaagaaaacatcgatgtcatcgaatgggttccagatccagctgaattcatctataatgcgatcgctcctgcagaagtggaccaagttatttttgatgatgaagatagcaaacatgctctcgttgtggttccagataataaactatctcttgccatcggtcgtcgtggtcaaaacgttcgtttggcggctcatttgactggttaccgcatcgatatcaaatctgctagtgagtttgaagaaatggaagcagctcaagaaacttttgaagaccaagtagaaagtggcgaagagcaagtcgattaagagagggagggaaaatggtaaaaacaagaaaaatccctttaagaaaatctgtcgtttcaaatgaaattattgataagcgcgatttgctccgcattgtcaaaaataaagaaggacaagtctttatcgatccaactggcaaagccaatggtcgaggtgcttacatcaagttagacaatgaagaagcggcacttgctaagaaaaagaaagtttttaatcgtagctttaatatggaagtggaagaagctttctatgatgaattgatcgcttatgtagatcataaggtgaagagaagagagttaggccttgaataagcaaaagataagtaatttgttgggcttggcgcaaagagcaggaaaactcatttctggagaagaactcgtgatcaaagcaatccaggaagaaaaagcaaaattagtttttctggcaaatgatgcagctagtaacctgacaaaaaaggtgacagataagggtcacttttatgaggttcaagtatctaccgtgttttcaacactagaattaagcactgcaattggacgtgctcgtaaggtcgtcgctgttgtagatgctggattttcaaagaaaatgaggtctcttatggaatagaagaggaggacagcaattgtctaagaaaagattatacgaaattgccaaagaattgggcaaggaaagtaaggaagtcgtcactcgtgcgaaagaattaggttttgacgttaagagtcatgcatctagtgtcgatactgatgttgctgaaaagttgatcaagagcttttcagcgaaaaaagaaacagtcgaaaagaaagtagcagaagtggttgccaagacaacggctgtcgcagagaaaaaagaagcagcgcccgtaaaaaaagaagggacaactgagacaaaatcagtaacaccagctgctaaaccaaagagtcgtaactttaaagcggaacgagaagcgcgcgcaaaagagcaggcagaacgtagaaaacaacaagacaatcgtccaaaacgtgatcgcaaggacaatcagcgtcatggtgacaaccgaaatcaacgaccacaagatcgaaatgaacaccgaaatcaaggttttgatcgtcgcaataacaaaccagatcaaagacgtagtgctcaaacccaagtggcaccaaaaattgatttcaaagcgcgtgcagcagcattgaaagcagaacaaaatgctgagtatgcgcgtggaagtgaagatcgctacaaacaacaagccacaaaagcagaacaagaacgtcaacagcgccggaaacgggtagaagtacctgaagtgaaaacacctgtacaggagccgactgttgaaagccatacgaagccagctgttgtagctactccagctcaagtagatacacgccgtaagaaacaagcgcgaccagataagaaacgcgatgattttgatcgtgaggaagatggtccaagaaaacaacaaaggaatcgaagtagtcaaaatcaagtgagaaatcaaaaaaatagtaactggaataacaataagaagaataaaaagggaaagaacaaccgcacagaagctccaaaaccagtaacagagcgtaaattccatgaattaccaagtgaatttgagtatacggatggaatgacggttgcagaaatcgcaaaacggatcaagagagagccagctgaaatcgtcaagaagctcttcatgatgggagttatggcaactcaaaatcaatcgctggatggggataccattgaacttttgatggtcgattatggaattgaagccaagaaaaaggtagaagtggataatgccgatattgaacgtttcttcgtggaagatggttatctcaacgaagatgagttagtggaacgtccaccagttgtaactatcatgggacacgttgaccatggtaaaacaacccttttggatacccttcgtaattctcgtgtggcgacaggtgaagcaggtgggatcacccagcacatcggtgcctaccaaatcgttgaaaatggcaagaagattaccttcttggatacacctggacacgcggccttcacctctatgcgggcacgtggtgcatctgttaccgatattaccatcttggtcgtagcggcagatgacggggttatgcctcagactattgaagccatcaaccactcaaaagcagccaatgttccaatcattgtggctattaacaagattgataaaccaggtgccaacccagaacgtgtcatcggtgaattggcggaacacggtgttatgtcgacagcttggggtggggattctgaatttgtagaaatctcagccaagttcaaccaaaacattgatgagttgttggaaactgtccttcttgtggctgaaatccaagaactcaaggcagatccaactgttcgtgctatcggtaccgttatcgaagcgcgtttggataaaggaaaaggtgcggtggcaaccctccttgttcaacaaggaactttgaatgtccaagacccaatcgttgtcggaaatacctttggacgtgtccgtgccatgaccaatgaccttggacgtcgtgtgaaggttgcaggaccatctactcctgtttctatcactggtttgaacgaagctccaatggcgggtgaccacttcgcggtttatgaagatgaaaaatctgcgcgtgcagctggtgaagaacgtgccaaacgtgctctgatgaaacaacgtcaagcaaccaaccgcgtcagccttgaaaatctctttgataccttgaaggctggggaagtgaaatctgttaatgtcatcattaaagccgatgtacaaggttcggttgaagcccttgctgcttcccttcaaaagattgaagtagaaggtgtgaaagtgaccatcgttcactcagcggttggtgctattaacgaatcagacgtgacccttgcagaagcttcaaatgccttcatcatcggatttaacgtccgtcctactccacaagcacgtcaacaagctgaagctgacgaggtggaaatccgtcttcactcaatcatctacaaagtgattgaagaaatggaagatgcgatgaagggaatgttggatcctgaatttgaagagaaagtgatcggggaagcagttattcgtgaaacctttaaagtctctaaagtgggtaccatcggtggatttatggtccttagcggtaaggttacacgtgattccaaagttcgtgtcattcgtgacggtgtcgtgatctatgacggtgctttagcaagcttgaagcacttcaaagatgatgtcaaagagatcacaaatggtcgtgaaggtggattgatgattgaaggttacaatgatatcaagacagatgataccatcgaagcctacatcatggaagaaattaaaaaataagaggctgactaggaaaaaagaggacttttctctgatttcctagtttttaaacacaaagcagaaaggagttcctatggcaagtcattttcggacagatcgagtagggatggaaatcaagcgtgaagtcaacgagattttacaaaagaaagtccgtgacccgcgtgttcaaggagttaccattacggatgttcaaatgctaggcgatttgtctatggccaaagtgtattattcaattatgagtgatttggcttcagacaatcaaaaggctcagacaggccttgaaaaagcaacaggaaccatcaagcgtgagttagggcggaatctaaaattgtacaagattccggatcttacttttgtgaaagacgaatccatcgaatacgggaataagatcgatgagatgttgcgcaatttgaacaaagactagagaggttggaaattttccacgcccagattgaaagacaaagtcttcttagaaactttccttaggtgagtacggacgtcagcgaacttcttcgaagttccatgactaattattgagcctaaggtcccaataattccgagtacctgaaactattaagtttcaggtacttttctcacgacgaaaagtttcagtagatgattgaatcactctaacgagtaacatttctttttatagaatttattagatttataaaaaagaatagtttgtctacagtctcgggttggaaatttccaaccccttttttggctcttaaaatgaggaaaataaaacagaaagaaaaaaacggtttcaaaaaataatagaaatttacagaaatctcttgtgtgattggaaattatcctttacaataggagaggagttttatttctgatctcaaatttggaggaatgaacatgtcgattaactggcaggaaattgtatttaactttttgggaggcctgggtctctttctctatagtattaaaaccatgggagaaggcttgcaacaggctgcaggagatcgacttcgatactatattgataaatatacgagtaatccctttttaggggttctagtagggattgggatgactgccttgattcagtcaagttcaggtgttacagtgattacggtcggtctggtgagtgcaggacttctaactctccgccaagcaattggtattgttatgggagccaatattggaacgactattacctcctttatcattggttttaaattaggagactacgctcttcccatgctctttatcggagcggtttgtctcttctttaccaaaaatcgtttggttaataatgtcggacgaatcgtttttggtgtcggtggtatcttctttgccctcaacttgatgagtggggctatggaacctcttaaagatttgcaagtctttcgtgattatatggtgcagttaagtaaaagtcctatcttaggtgtctttgtcggatcaggattaacacttttgattcaggcctcttctgcaaccattggtatcttgcaaaatctctatgctagtcatttgattgacctgaaaggggccctcccagttctctttggtgataatatcggaacgaccattacagctatcattgcttccttgggagcgaatattacggccaaacgtgtggcaggtgcccatgtagcctttaatgttatcggaaccattatctgtcttgtcttccttgttccgtttacatctttgattcaatggtttgaaacgactcttcatttgtctccagaaatgaccatagcctttgctcacggaacctttaatataaccaataccatcatccagttcccattcattggagctttggcatactttgtaaccaaactgattcctggtgaggatgaggtggtcaaatatgaaccgctctatttggatgaaaacttgatcagtcaagccccttcgattgctctaggaaatgcgaaaaaagagttgcttcatttaggtggatatgcagacaaagcttttaatctctcttatgattatattgttcatcaaaatgaaaaaacagctgaaaagggacacaagacagaagaagccattaataccattgatgaggatttgactcgctacttgattcgtttgtcgagtgaagccttgagtccgagagaaagtgaagttctcaccaacatcctagattcctcacgggatttggagcggattggagatcacgcggaagccttgatcaatctgaccgattatttaattcgtaagaaagtggtcttttcagaagcggccttggctgaattggaagatatttacaaccaaacccatcaatttgtagaggatgctttgaaagccgttgagaacaatgatgtgagtcttgcaaaccaattggtagcacgtcacgaggcaattgaaaagttggagaaaaaacttcggaaaacccatattcgtcgtttgaaccacggtgaatgtacacctcaagccggagtgaactttattgatatcatttctcactatacacgtgttgcagaccatgccatgaatctcgctgagaaagtacaaatcgagcaaatttaatgaatgtcaaacagagtaagtaggaagcttactctgtttttttgttggattctattcaaaaataggtctagaccatttacaaataaaagtgaaagcgttataatatgtatgaatataaatggaacacagttcctacaatggaaaggacgattttatgtctacatatattaaagcagatcaattttattacccacatggggttcgcctcggaggctatttggaactcgttgatggcaagtttggaaaacatgtggaaagcttaccagaaggtgtggatgtgctagattattcagggtacagtattgcacctggcctcgtggatacccatattcacggttttggtggggtagatgtgatggataacaatatcgaaggcactctccataccatgagtgaaggtctcttgagtacaggggtcacaagctttttgcctacgaccttgacttcctcttacgaacaacttttggcagtaactgaaaatatcggttcacgatacaaagaagcaacaggagccaagattcgtggtatttattttgaaggaccttattttacagaaaaatacaagggggcacaaaatccagcttatatgaaggatccaagtatggaagaattccgggcttggcaaaaagctgccaatggtctgttgaataagattgcccttgctcccgagcgtgaaggggtagaagaatttgttcggaccattactagcgaaggggtgactgtcgctctaggacactccaatgctacttttgaagaagctaaaaaagcggttgatgcaggtgcgagtgtctgggtgcatgcctacaatggtatgcgtggtttgacgcaccgtgaactcggtatggttggtgccatgtatgagttgcctcatactacagcagagttgatctgtgatgggcatcacgttgatccgctagcttgtgatatcctgatgaaacaaaaagggaaagaaaatgttgccttgattactgactgtatgacagctgggggcttagaagacggggactacatgctaggggaattcccagttgtggtcgctgaagggacggctcgcttgaaatcaactggtaatctagctggctcaattttgaaattgaaagatggattaaaaaatgttgtagagtgggggattgctaaccctcacgaagcagtgatgatggccagcctcaatccagcaaaatcagtccatattgatgatgtttgtggtcaaattcgagaaggttatgatgcggacttcatcgtgcttgatcaaaatttggatctggttgcgacctatctcgatggggtcaaacgttaccaggcgactaactagattcaagaatcgaagatagaatacttcctctctaggtcatacctagagaggtttttgtgaggtattcatgggggttaaacagtctgtaggggcttgttatttgtcaatggtagtgtaattttgtgaatgctgtcttttcatgctataatgggaattgaaatgtgaggtagtttatgaaagcaattgatatacgttttttattgatgggaatttttttcttgctctatgggattgtaagaaaaaatatctttattgtgatcgttggtggggcatttttactctatagtttttatagcaagaagatggagccaaccaagaagaatatttttaagccagagctcaagcttcgagggcctaagaaaccgaaatcgaagaaaggaaagaaaaaatgaatcattatcgtttgaataatggggtgaagattcctgtattgggatttgggacgtggaaagcagcggatggagaagaagcctatcaagctgtgttagctgctttaaaagcaggttatcgccatatcgatacagctgcgatttatcagaatgaagagagtgtggggcgtgctattaaagacagtggtcttgcgcgcgaagacctgtttattaccaccaaactttggaatactcatcacacttatgaagatgctcaagctgctttgaaagagtctcttgataaattgggcttggactatatagatctttatttgattcattggccaaacccaaagcctcttcgagacaatgatgcttggaaaaaacggaatgctgaggtttggcgagcaatggaagatatgctagctgctggcaaagttcgggctattggcgttagcaattttctgcctcatcatttggaagccctccttgaaacagctcgggtcatcccagctgtgaaccaaattcgtctagcacctggggtttatcaaagtgaagccattgctgcaagtcgcaagcatggcattttactagaggcttggggaccttttggccaaggagaattgttccaaaatgaacaagtaaaagaagtggctactaaatatgggaaaaccgtcgctcaactagccctagcttggagtttacaagaaggtttccttccactgccaaaatctgttacgcctgagcggattgagagcaatctggattgctttgattttgaattgacggcagatgatgtggaactcctgcgctatcttccggttgaagcgggtgcaccagatccagacaccaaagaattttaaaaaatgatatctaataataaaaaccgaggacagttttgttctctgtttttttatcttttcagtcgtgaaaaagttttcaaataaaaaaaacagacgtactataatacttagttactattgctcggaatataacgaataaaaataaattaatagttagtaatgtatgtaaatattacaattgtgttacaattcatttttgaatgaattttcagacaattttgcgttataatagttactattaaaataaaaggggagtttctatgaatagacaagagcgtttttcattaaggaaatacaaatttggtgtagcctcagttttattaggggctgttttggtatttggatctgcacaagcgagtgcagaagaacaaacagcgggtcaaacgagcgctgggatacagcttgtagcaaacagtcaacaggcaccgactgaggtagaacattcacaaggtgcagaggttcctaaagaggcaacggttgctctacaaacaaaaccggaagaagcatcaaaaccagtagaaaaagctacagaagtggctactccgacaagttcggaaacaactgagcgccatgatgtaactgaaaaacctcaaagcatcgaaagtgatgaaattattactgttccacaaacctggaagcaaggatataaaggtgaaggaatggttgtggccgtgatcgactcgggcttggatgtgaaccacgaggttcttcgtattacagatccttcaaaagccaagtttaaaaatcaagaagaaatagaagctgctaagaaagcggcaggaattgattatggtaaatggtataacgacaaagtcgtatatgcctatgattactttgacggtactgacaatatcaaagaggctgaaagagattctcacgggatgcacgttacagggatcgcaaccgggaatcctgataaagaagcaggaaacggtgaaaagatctatggtgtggcaccagaagcgcaagttatgtttatgcgtgtcttttcggatcgtcaaaaaacaactggttctgctctttatgtaaaagcgattgatgatgctgtagcccttggtgcagatgccatcaatatgagtcttggatcctctactggttctatggtcaatgcaggttcagatatcattgatgcgattaaacgagctcgtgctaagggtgtatctgtcttgatctctgcggggaatagtaatacttttgggaatggatattcaagaccgtctgcagaaaatcctgattacggtttggtaggaaatccttcaacagtagaggactctatctctgttgcttctatcaataacaaaattattacgacagaagtttttgaagtcaaaggcttggaaggtaatgcggatgtagataacggtaagtttgactacagtaagtctgcaacagatacagacttcgaaaaaggtaaagaatatgagtatgtatcagttggtcttgggaaagaagatgatttcaaagatctagatcttactggtaaattagcactgatccaacgtggagaaatcccattcacagaaaaaattgcgaatgccctccatcatggtgcagtaggggccttggtttacaataatgtagaaggatctaatcttggaatggcaattgatggagatgctaagaaaattccatctgtcttcatttcaaaacgctatggggaagctcttaaagcaggatcttacaaagttgtcttcaacaataccatggccaatcgtccatctcccgaggcagatcaattgtctgatttctcaagctggggagtgacaacagatggtcagttgaaaccggatgtcacagcacctggtgggaacatcttctcttctttgaatgacaatacctacggagatatgagtggtactagtatggcctctcctcacgtggcgggtgttgcagccttggtaaaagaatatcttgtgaagaaccatccagaattgactccagaacaagtttctgaaactgtcaaggccttgattatgtctacggctaaaccacatattaacaaagaaaccggtgtctatacgtctccacgccaacaaggagcaggggttgtcgacacagcagcggctgtttcaacagacttgtatgtgactggtgaaaacaactacccaagtgtcactcttggaaatgttggagatagctttacctttgatgtcactgtccacaatatttcagataccgatcgtaccttgaaaatgttggttaatactgatacagatgaagtgaaagatggtaaatttaccctccgtccacgtaaattaacagaaactgcttggcctgaagtaactgtgaaagcgcatagttctgaaacggttacggttaaagttgatacaagtaaattcacagaagaattgagcaaagaaatgccaaatggctatttccttgaaggatttgttcgttttgtcgatccagcagatgacggggatgtggtcagcttgccatttatgggattcaagggagaattccaaaaccttccagctgtcgaaaaaccagtctatgatttggtacgcgaaggaaaagatggtttctactaccatattccaaaagatttgaacatttcctataatgctaatgtttcagctctattaacacttcaaaatgacctccttcttacacaagggaaacgagatggtcgtcgtattacagtccttggtattgaagaaaatgcagaaggaactcatgctcttcaagtggatgaaaacggaaatgttcgcattgccatttcaccaaatgaagatgggaataaagacctcgttgaatacaagacggtcgctcttcgaaacattgaaaaccttcatgcaactgtctacgcagcaagcgatacggaacataaaaatccactgtgggaaggaactccatctgatcatcgtaagaacttctttgatggcaatgaaaagaatccacgtagctacacgctagataatactgcttggaatggtacggatgcaaatgggaatgcagtggcagatggtgtatatgattatgtcattcgttacacaccaatggttccgggagctgaagagcaatcaacgaccttcaaggttcaagttgatacccaaaaaccagtgatcacatctggatatattcgtttcaaagatggggctcaacagtttgtagcacgtaaagccaaagatgttggtgaaggtggtattttaactgaaaaactcgtttacgtgactccatttgatgataaggggacaatgatccaaacgagtgaagataagactggtacacgtgcgcttgaaaattaccatgtgatcaaggccaatgcagatggcagcttcgatcttcctgaaaacatcgataagaagaatatctactactatgtagaagactttgcggggaacgtagactatatttcactagctgatttggtacgagatcaaaatagtggtcgtattcaaattgcagtgcgtgatgctaagacaaacaaagatatagataccatgtatgtgtatcgtatcaaggacagcaatggtcaatatgtaacggttgataaaacaaaagatattaacttcttgaactttggtcattatactgcagaaatctttacgtatgatcgtacagaagtgaaatttgtcagcagcttgacgcaagaatttgatttgacagaagataatagtttccaaacaatcgctttccttgctaatactttggaatacgcaccagttagcattagctttgatcaaccggtttcaaaagcggctacgatcgtattaaaaggtgctgaaggtgaaaactttgtattgccagctgaaaaatatggtaaaaacggctttggtaaaactgtagcaactggtcaatataccttggtcgcaacccttcctactggctatgaattggctgaggaagctcctgtaatcacagttgttgctggacgtaataataactatcgtatcggagtgatttcaaaagtggatctcttgactgctttgaacaatcaggcagatgtaacgaagacagctcactacttcaatgcgagtgctgataagaaggaagcttatgatcaagccttgcaagctgctcaagcagccttgacgaataaggtcagtcaagagcaagtcaaccaagcagtagctagtcttgaagctgccagccaagctttggatgggaaagattcaaacgttgtagccttgaaagaagcgatgcaggcatacgatgctacaactaaaacgggtcgttatgctaatgccaaagaaaaagtacgtcgtgactacgatcgtgctttccaaacagtagccttgcttgcggttgatccaactgtgaaacaagaacaaatcaatcaagcacttgctgaacttagccgtgcagaaggaaaattgaatgggaaagcaactgatttttcaagcctgaaaaaatatatcaaggatgaattgaaattccaagaaaaggatgctaaatttatctatgctggaaataaagaaaaagaagcttatctcacagttttcaagaatgctcaagccattcttacaaatccaggagcaagccaacaagatgtgaaagatgctttgacagccttgaagaatgccaagaaaaaacttcatggtaaaaaaccaaaagcttcaagacgtccataagaaaaacaaaattgtttgttagcctaaaatccgtatgaaacgattgtttcatgcggattttaatttacaagtcactaaaattctgctataatactagtcaagaaagaagagcttacggcgtttttctagcgagcttgggatagtgagagccaagtagagcaaagtaagcaagtggcgctttctctcagtaaaaagctgagtaaagtaaaataaaatgaagtaataaattagggtggaaccgcgtttctgacgcccctaggtcaaaggacttaggagcgaagacacggttctttttgtatcctgagtcacaagaaactttatgaataaggagtaaaccatgtccaaaaaattgactctccactgcgtcagtggcagagacctccttacagtcggacggctctacgctcagggtgcctgagctaaacgcagtactaactcgtcttgcctcgtacgatcgacgaggcagactcgtgtcgcaagaaattatagaaaaaggagtaaaacatgtctaaaaaattgactttccaggaaatcatccttactttgcaacaatactggaatgaccagggttgtatgctcatgcaggcttacgataatgaaaaaggtgcgggaacaatgagtccatacactttccttcgtgccattggtcctgaaccatggaatgcggcttatgtagagccatcacgtcgtccagcagatggacgttacggggaaaacccaaaccgcctttaccagcaccaccaattccaagtggtgatgaaaccatcaccatcaaacattcaagaactctaccttgagtcattggaaaaattgggtatcaatcctttggaacacgatatccgtttcgttgaagataactgggaaaacccatcaactggttcagctggtcttggttgggaagtttggttggacggtatggaaatcactcagttcacctacttccaacaagttggtggtttggcaactggtccggtaacttctgaggtcacttacggcttggaacgtttggcttcttacatccaagaagtagactctgtttatgatattgagtgggctccaggcgttaagtacggagaaatcttccttcaacctgaatatgaacactcaaaatacagctttgaagtttctgaccaagatatgcttcttgaaaacttcgaaaaatttgaaaaagaagcaggacgtgctttggaattgggccttgttcaccctgcctatgactacgttttgaaatgttcacacaccttcaatttgcttgacgctcgtggtgctgtatcagttacagaacgtgccggctacattgctcgtatccgtaacttggcccgtgtcgtagccaaaactttcgtagcagaacgtaaaaaacttggttacccacttctcgacgaagccacacgcgcaaaactcctagcagaagaggaagagtaaagagagcgtattagatgggattggatgatagagcaatcctacagaaccagttgccacagtgataaaggtatcgttagagaaactaacgataccaggcaaaattggagaccttaggctccaattttagcaatgaaacgacgaagtcggttgcttgcgtgccaatcacgtaaggcaaactggaaagaaagatatttttcggagaaaaaacatgacaaaaaacttattagtagaacttggacttgaagagttgccagcctacgttgtcacaccaagtgaaaaacaactcggtgagaaaatggcagccttcttggatgacaaccgtctttcatacgaaagcattcaaactttttcaacaccacgccgtttggccgtccgtgtgattggtttagcggatcaacaatcggatttgaccgaagattttaaaggaccttctaagaaaatcgccttggatgcagatggaaacttctcaaaagcggctcaaggattcgtccgtgggaaaggtttgactgttgacgatatcgaattccgtgaagtcaaaggggaagagtacgtttatgttacgaaacacgaagctggaaaaccagctaaagaagtcttggctagcgttccagaagtgcttgcttcattgaccttccctgtcagcatgcactgggctaacaacacatttgaatacattcgcccagttcacaccttgacagttcttttgggcaacgaagcgctcgaccttgatttcttggatatccagtcaggtcgtgtgagccgtggacaccgttttcttggacacgaagtggaaattacccatgcggattcgtatgaagaagaccttcgcacggtttacgtgattgcggatagcaaagaacgtgaaaatatgattcgcgagcaaatcaaagccatcgaagcagaacaaggtgttcaagttcaaatcgaagaagggcttttgaatgaagtcttgaacttggtcgaatacccaactgcctttatgggaagttttgacactaaatatttggacgttccagaagaggtcttggtgacctcaatggaaacgcatcaacggtactttgttgtacgtgaccttgatggtaagcttaaaccaaacttcatctcagtccgtaatgggaatgctgagcacttggaaaatgttatccgaggaaatgaaaaagtcttggtggcacgtcttgaagatggtgaattcttctggcgtgaagaccaaaaacttaagattgaagacctcgttgctaaattggcgaacgtgaccttccatgaaaaaatcggttctctttcagaacacatggcccgtgctggtgtcattgcagcgtcactagctgagcaagctggtttgactgctgaagaaacggcagccgtagctcgtgcagctgaaatctacaaatttgacctcttgacgggtatggtcggagagttcgatgaattgcaaggaatcatgggtgaaaaatacgccatccttgctggtgaagatgctgcggttgcgacagctatccgtgagcactaccttcctgattcagcagacggagcccttccagagactaaggttggtgcgattcttgcccttgcagataaattggataccctcctttcattcttctcagttggcttgattccatcaggttcaaatgacccttatgcgcttcgtcgtgccacacaagggattgttcgtatcttggatgcctttggttggcatatccctatggatgagttgattgacagcctttacggactttcatttgatagcctttcatatgacaatcaagcagaagtgctcaacttcatcaaggcgcgcgtggacaagatgatgggacgcacaccaaaagatatcaaagacgctgttcttgctggttcaaactttgtcgtggctgatatgctggaagcagctgaagctctttcagaagctgcgaaggctgatggttacaaggcggctgttgaatccctctctcgtgccttcaacttggcagagaaagcagatgcttcagtagcagtcgatgccagtctttttgaaaacgatcaagaaaaagcccttgctaaagcgattgaagagcttgaattgactggttcagctagtgacaaattggctcaactctttgctcttagctcagtcatcgatgctttctttgacaataccatggtgatggcagaagatgaggctgttaaaaacaaccgtttggcccttcttgcaggtctggttgcgaaagctaacgctgttgcagctttcaaccaattgaacacaaaataagtacctgatgacaggtagaaagtaggtctgatgatgacacctgaaaaaatcgctcgcatcaatgagcttgcaaaaaagaaaaaaacagaaggtttgactccagaagaagcagtggaacaagcaaaacttcgtgaagaatacattgaaggttatcgtcgttcggttcgtcaccacatcgaaggtattaaaattgtggatgaagaaggaaatgatgtgacgcctgagaaactacgccaagtacaacgagaaaaaggtttgcatggccgtagtctcgatgaccctaattcataagcaaaagagtgctggaagagactccagtactctttttgatctataaaattcagaatattctggactagattgaccaatttttaaaaacatggtatagtagattgtgtgaaaatttgaagtatacttttctgaaaatgtacagaaaaagaattggagtaatcatatgtcaaaaaaacatcatcctagtcaagaaaccgaaaatgggatggttcgtggtttgcaaaatcgtcatgttcagctgatcgctattgcaggaaccatcgggacaggactctttcttggagccggtcgttccctttctttgacaggtccctctattattttagtctatatgctgactggagccttcatgtacttgatgatgcgggcgatcggagaaatgctctatatggaccctgatcaacacacctttatcaactttatcaccaagtatctaggaaaaggttggggttatttttcaggatggtcctattgggtctccttggtatttttgggaatggcagagatcacggctgtttccaactatgtccagctttggtttccaaattggccagcctggcagattcaaattgtctttttagcgcttttaagttgtgtaaacttgatcgctgtgaaggtttttggagaggttgaattctggtttggaatgatcaagattgttacgattttagccctgatcgctacagggatctttatggtgacgactaactttgaaacaccagctggacacgctagcttaaccaatattaccaatggttttcaaatgtttccaaatggttgggtcaagttcgtcatggccttccaaatggtcttctttgcttatcaagcgatcgagtttgttggaatcactacttctgaaacagctaatccccgccaagtattgccaaaagccattaaagaaattccaatccgaattgtgattttttatgtaggggctttgttggcgattatggctattttcccttggcaacagcttcccgtcaataagtctccgtttgtaacggtctttcagatggtaggaatcaagtgggcagcagggttgattaattttgttgtactgacagctgctgcatcctccttgaattccacactctattcaacagggcgtcacttgtaccagattgcaaaagaaacaccaaacagcaaagtgatgaatcgtttgaaactgaatagcttatctcgtatggggattccaagtcgcgcgattattgtttctgctattgtggttgctgtgtcagcctttatcaatatcttgccaggtgtctcagatgcctttgccttgattacggcatcttcttctggtgtctacattgctatttacattttgaccatgcttgcccatcttaagtaccgtaaatcgaaagaatttatgccagatggttttgtcatgccagcctataaagtgttgaatccattgaccattgttttcttcctctttgtattcgtttgtctcttcttgcaagaatcaacatacattggagcgattggagcaaccatctggatcattctttttgggatttacagcaattggaaacataatcaataaaccgcaagagagtgggacagaaatcggtaattcgttagaattcgatttcgtcgtcccacctccgcacagttgagtagggctgtaaaagctgatgaaatcagcgtagtagagcccactcaaccactgcgtcttgctcgacaatccaaaaataattgagaggctaggacttttgtcctagcctctttattatttcagagccagtttgctttcttttaaggaatttcttggagggaataaaagaaaaacagagatggaagaaattatttttcttccatctctgttttttgtccttgaatggcttttttgagccaccaaagtgagccgactaggatcagggcagcaagccaaaaaatccaagcctcaatagtagttagaaaaaagtagagagcgatagcatcgaccaataaaagtgggatgagaatctgttttcttattttcataagaatattgtatcataaatcctagaggaaacaagtgaaatcaagcctttctaggtattttgtaggatctgaaaaggtcagatagggttagttagtgaattttctttcaggagtgcatcttggtcccatttgtggtaaaatagtaaagatatgagtaaagaatttcatcatgtaacggttttgcttcatgaaacgatcgatatgctggatgttaagccagatgggatctatgtagacgccacattgggtggggcaggccacagcgaatatttgttaacaaaattaaatgaatcgggccatctttatgcctttgaccaagatcagcatgcaattgagaatgctaagattcgtttagctccattcatcgagaaagggatggtgaccttcattaaggataactttcgtcatttaaaggaacgtctaaatgacttaggtgtgactgaaatcaatgggatttgttatgacttaggtgtatctagtcctcagttagatgaacgggaacgtggtttttcttacaagaaagatgcgcctttagatatgcgtatgaatcaagaagcttccttaacggcttatgaggtcgttaatacctatgattaccatgatctagtccgcatctttttcaaatatggagaggataaattttccaagcaaattgcgcggaaaattgagcaagcgcgagcaattaaaccgattgaaacgacgactgaattagcagagattattaaatctgctaaaccagctaaggagctcaagaaaaagggccatccggctaaacagattttccaagccattcgtatcgaagtcaatgatgaactgggagcagcagatgaatcgattcagcatgccatggatttgttggccctcgatggtcgtatttctgtgattacctttcattcgttggaggatcgattgaccaaacaattgtttaaagaagcttcgacggttgaggttccaaagggacttccctttattccggatgatttgaaaccaaagatggagttgatcaaccggaagcctattttgccaagcgaagaggagcttgaggaaaataatcgatcccattcagcaaaattacgggttgctcgaaaaatacacaagtaagaggaattgatatggcagcaagagatgagagaacaagaacacaggtattgcaagaccgctttcgccgtttctctagagtagaaaaggctttttacggatcgattgtcctaacagctgtgattttagccattagtatcgtctttatgcagacacggattttacaagtacagagtgagttgacagacttaaataccgaactggaggctaaaaagacagaattggctgatgttcgtcaagaggtcaatgaattaacacgttatgatcgtttgtcgcagttggctagttcccagggaatgaagttgcaaaaagaaaatcgaaaaacagtgagtgcaagtagtgatgaataaaatcaaaaaagttttgattgggtattcgataaaaaaacgtcgcttaccagatcagaatcgaaaacaagttgggaaaaatctcagtgtattggcgattttcctcttttttctcttcctaataaactttgccctaattattggaaccgataaaaaatttggtgtgactttgtcggaacaagcaaagaaggtccatcagcagacagtcattgtgccggcaaaacgaggtaccatctatgaccgaaatggggcggtgattgctgaagatgccacaacctacaatgtttatgctatcatcgataagaagtataaatcagctacagggaaggttctctatgtagaagagagtcaatttaagaaagtagcagaaatctttaagcagtacctaggtatggatgaggattacgtcattaagcaattgtcgcaaaagaaattgaaacaagtttcttttggatcgaacggaaacggcattacttatagtaatatgacggctatccgtgaggccatggaagcggcgaagattgaaggggttgcctttacaactagtccaaatcgaagctataaaaatggagtttttgcctctcaatttataggtcaggcctctcttcaagaagataaagaggggaataaaaccttgaaggggcaatcagggatggagaaatccctcgatcgtattctcgctggtcaaaatggagtcatcacctatgacaaagaccgaaacgggaatatcgttcctggttcagataaggtttctgtcaaaacagaagatggaaaagatgtttatacgaccatttcagcagaattgcagacctatcttgagacacgtatggatgttttccaagaaaaagtaaaaggaaagtatgttagtgcgactcttgtgagtgcaaaaacaggggaaatccttgcgacgacacaacgcccatcctataatgcagataccaaacaaggattggatctgaaaaacttgaaaacttggaatacgattctttatcaggatcagtatgaaccaggatcgaccatgaaagtcatgttgttggcttcagcgattgaccatggaacttttccagcatttaatgaagtttactataataatgaatttcaggttaaagatgcgacaatccgtgactgggatgtcaatatgggactttctgaaggtcgttatatgaatatcgcacaaggttttgcatattctagtaacgtcggaatgactcgtctggagcaaaaaatgggaaatgctgtctggatggactatctaaaccgctttaaatttggccttccaactcgttttggaatgggggatgaatcctatggagggcttccaggtgacaactatgtcagtcaagttcagtccgcttttggccaagggatttcagttagtcaaactcaaatgcttcgtgcttttagtgcgattgctaatagtgggcaaatgttggagcctaagtttatcagcgctatttacgacagaaagtcagacactgctcgcaaatcaaaaacggaagttgtcggaaaaccagtttcagaatcggcagcacaacagacccgaaattacatgattacagttggaacagatccagagtttggaaccctatacagcaatgggccaattattcaggttcctggtcaaaatgttgcggtaaaatctggaaccgcacaaattgcgacggatcaaggatatttgcaaggagaaaatgactatatcaactcagttgtagccatgacgcctgcggaggatccagagtttattatgtatgtaacggtccaacaaccagaagtgacattctcagccaatagttgggaagaattggttaatccgattttggaagatgcagttgctttaaaagacgaattgcatttgacatcagaggcaccaactttggataatgtgaccaaagaaacgacctacaaaatcccttcagtagaaactctctctaaggagttgaatctgaaacaaaatctgagcccaggtgcttattcagaggaattgcgtcgcaatttggtgcaaccaattgtcctaggaaccgggaaaaatatccgcaagatgtctgtggatgtaggctctaaagtcaaagccaatcaacaagtattgttattgacagaagactttgatgcggttccagatatgtatggttggactaagaaaaatgcagacatctttggagaatggactggaattgagattacctataaaggtagtggaaagaaagtaaccaaacaaagtgtcaaaatgaacacctcactcaataaaactaaaaagattacgttaacattaggagactaagatgtatattgctacgatccttgtatcgtttctattaacagtggctgctattccggcctttattcgattttaccatcgtgctcatatttccggacaacaaatgcacgaagatgtgaaacaacacaaagcgaaagctggcactccgacaatgggtggagttgtatttctcattacagccgttctagttagttttgtcgttaccgtattgactggaaatttcacgcgccctgttcaacttattctatttatcttgattctatatggaattgttggatttttagatgactttttaaaagtttttcgtaagattaatgaaggtctcaatccaaaacaaaaattggcccttcaactcgttggtggaatcatcttctatattttttctgaacgccacggtgcaggaagccttttaaatgtctttggttacgatctttacttgggccatttctacattctctttgctttattttggttggttggtttttcaaacgcggtcaatttgacagatgggattgatggattagccagcatctccgttgccattagcctgagtgcctattcctttattgcctatatgcaaggaaaatgggatattctctttgtaaccttaagtatgattggggccttgcttggattctttgtcttcaaccacaagccagctaaaatttttatgggagatgtcggtagtttagctcttggagggatgcttgcagccttgtcaatggctctgcatgtagagtggaccctcctcctgattggtttagtttatgtcattgaaacaggttcagtgatgctacaagtgacctatttcaaatggaccaagaaacgctacggggaaggacgtcggattttccgaatgactcctttccaccatcatttagaattgggtggcctttctggaaatggccaaaactggtcagaatggaaagtggatgcttttatgtggaccattgccttggtgacaagtggtatcactcttgtccttctctatctataaaacgacggtgggcttgcccatcgttttttaatcggcacaagggagagacttgacatgaggaaaaacaactaaaagagaagcgcgaagacagcttttctgatataataatagagatcatgaaaggaactgagaaaatgaaatttacagagtttaattttaagccctatattcaagaggcattgaaagaaatcaattttagagaagcaaccgaagtacaggaaaaactaattccgattgtcctagctggaaatgatttggtaggagagtcaaagactggttctgggaaaacccatacgttcctcttgccaatttttcaaactttaaatgaagaaagcgaacaagttgaagcggtcatcacggctcctagtcgagagttggcaacgcaaatttaccaagctgcccgtcaaattgctagtcattctgaaaaagagattcggattgtaaattatgttggaggaacggataaaagccgtcagattgaaaaactgcaggtcaaacaaccgcatatcgtgattgggactccaggccggatctatgatctggttgcatctggtgatctggctattcataaggctcatacctttgtggtagacgaggcagatatgacactggacatgggatttctgtctactgtggataagattgcttcgagacttccgcaacaactgcaatttttagttttttcagccaccattccgcaaaaattacaaccttttttgaaaaaatatctctcaaacccagtcatggagcaaattaagaccaagacggtgatttcagataccatcgataactggctggtttccaccaagggtcgagataaaaatgagcaaatttaccaattgaccaagaccttgcaaccttacttagccatgattttcgtcaatacaaaaacgagagcagatgaccttcatgcctatctagtagcccaaggattaaaagtggcgaagattcacggagatattccaccacgtgaacggaaacggatcatgaatcaggttaaaaatcttgattttgagtatattgtggccaccgatttggcggctcgtggaattgatatcgaaggggtgagtcatgtcatcaacgatgctattccacaagatctttccttcttcgttcaccgtgttggccggacaggccgcaatggtctaccaggtgtcgctattactctttatcaaccgagtgatgattcagatatccgtgaactagaaaaaatgggaattcgtttcgtaccgaaagtgttgaaaaatggggttattgaagatacttatgatcgggacagacgggccaatcgtgagaaaaagcaagagaaacttgacatcgagatgattggtctggtgaaaaagaaaaagaaaaaaatcaaaccaggctacaagaaaaaaatcaaatgggcagttgatgaaaagcggagaaaggctaagcgagctgaaaatcgtgcgcgtggccgggcggaacgaaaggccaaacgacaaactttctaacccttgttgcaaatattcaggagaaaacatagatcttttttatgaactccataaagaaaaactattgggaacttatctaaaattatgatagactaaatttgagtagtctatcatttttctatttctgtagcaatttttggaattccgatagtgaatgtgatagaatgtttatgttcgagaaaggaagtaacaaaaatgtttacaactgatgttttaacagccaactggtatgctgactttttaaaacacattccagatagcaagctgtttagtttgagagctgtgtttgatgcattcccgtcggtcatagggaaattgcctgtgacgattttacttgctctaggaggcgcattttttgggattatttttgccatggtttttgctctggtcaaaattaatcgtgtacgaattctttacccgattcaagctgtttttgtcagttttttacgggggactcctttgttggtccagttgatgttgacctattatgggattcctcttattttaaaagcgatcaatcagtcttatggaacagcttttaatattaatgccattccagctgagttatttgcaattgtggctcttgcctttaatgaggcggcttatgcgagtgagaccatccgggcagcaattttatcggttgatcctggtgaaattgaggcagcgcgtagtcttgggatgacaaatcgtcaagtttatcgtcggattattattcccaatgcggcagtcgttgcaaccccgaccttaatcaactctctcattggcttgactaagggaacctcgctagcctttagtgccagtgtggttgaaatttttgcccaagcacggattattggggggagcgatttaaagtactttgaacgctttatcacggtatcgattgtttactggattgtgaatattctcattgaaatactaggccgtcacattgaacgtcgactggatattgagactcccgtagcaattgatttaccagatcaggaggtccggatctaatgatttatatttcagaattatcaaagacattttcaggtcaaaaggttttaaataatctgagtttggaaattcaaaaaggggaagtcgtggccttaatcgggtcttcgggagctggtaaatcaactttcttacgcagtttaaactatttggaagctccagacagtggtagaattaagattgatgatttcgaggttgattttgaacacattacccaagatcaaatcctaaccttaagaagaaaattggccatggtgttccaacagtttaatttgtttggtagaaaaacagctcttgaaaatgtgaaagaagggctcattgttgtgaagggcttatccgatcaagaagcaacgaaaattgctcgagaagaactggcaaaagtcggcttatcggatcgggaaaatcactatcctcgtcacctctcaggtggacaaaaacaacgggtggctttggcccgtgccttggccatgaaaccagaggttcttttgctggatgaaccgacttcagccttggatccagaattggttggagaagttgaaaaatccattgccaatgcggcaaaatcgggacaaaccatggtactggtcagccatgatatgtcttttgtagcgcaagtagcagataaggtcctatttttggataaaggacggattattgaatctggaacaccagaggaaatcatgcaacatccaaaagaagaacggacaaaagaattctttgctagttacaaacggacctatgtttgatataatagaggagaggtaagactcagctggcgatgctagctgggtttgttttctgaaaatgtaaaaatatttggagtcgtgatgttaaataaattattgtccttatatttacaaagtttagtgacgacaacgattttagttgggatcgcttcttgtatttggattggctaccgtgcccttaagaagaaagataaaacagccaagcaacgacaagcccatttgtatgatatcctcttaattgatatcatgacgattcctattttaacctttgcggtcatagggattttgtttatctttcaagcacgataattgcaaaaatatcgtgtgagaattataatggttacaacaaaacagaaagaggttgagtatgtttgatacagtgattgttggagcaggccctgcagggatgactgctgccctttatgcagcacgaagtaatttaaaagtcgcattaattgagagaggaattccaggcggtcaaatgaacaatacgtctgacattgaaaactatcctggctatgcgaatattagtggcccagacttggctgaaaaaatgtttgagcctttagaaaatcttggtgtggagcatttatttggtcaggtagagcgcatcgaagacctcggagtaaccaaaaagattgtcacagatgatggggaatatgaagctaaaaccgtggtgattgcaacagggtctaatcaccgttcattgaatgtccctggtgaagaggagctgaatagtagaggggtttcctactgtgctgtttgtgatggagctttctttagagacgaggatctcttggtcgttggtggtggcgattctgcggtagaagaagctgtctttttgactcagtttgcaaaaacagtgaccattgcccatcgtcgtgatcaattgcgtgcccaaaaagttcttcaagatcgtgcctttgccaatgataaaattcactttgcttggaatacggttgttgaagaaattaagggtgaacaaaaagtaacttctgtccttttaaaagatgtgaagacaggagaggttagagagcaagccttcggtggtgtctttatctatgttggtttagatcctgtcagtgattttgcgacagaacttggtattttagatgaaaatggctgggtgatcacggatgatcatatgagaaccacagtcccaggtatttttgcggttggcgatgttcgtcaaaaagatctacgtcaagtgacgacagccgtcggagacggtgcgattgctggccaagaagtttataaatatatcacagaaaacttttaatccaaaaaaatctgagcttcctgtctcagatttttttcatgctttcctttcagtattcaatagggctgaaatatgctataatggtactaattttatggtaggaattcatagaacaaatctataaaaaagaggtatacatatgtatccagatgacagtttaactttgcatactgatttataccaaatcaatatgatgcaggtctattttgatcaaggtatccacaataaacatgccgtatttgaagtgtattttcgtcaacagccttttaaaaacggctacgcagtatttgctggcttagagagaattgtgaaatacttggaaaacttgagtttttctgagagcgatattgcctatttagagtcactcggttatcatggggccttcttggaatatctccgtgatctcaagttggaattgacggtacgctcggctcaagaaggagacttagtttttgcgaatgaaccaattgttcaggtagagggccctctagctcagtgccaattggtggaaacagcccttttgaatattgtcaactttcaaaccttgatagccacaaaagctgctcgtattcgttcagtcattgaagatgagcctttgatggaatttggaacccgtcgtgcgcaagaaatggatgctgcaatttggggaactcgtgcagcagtcatcggaggtgccaatggaactagtaatgttcgtgcaggaaaactctttggaatcccagttttaggaactcatgcccattctcttgtacaggtttatggaaatgactaccaggcctttagggcttatgcggaaacccataaagattgtgtcttcctcgtcgatacctatgataccctgcgtattggggtccctgctgctattcaggtagcgcgtgaaatgggagataaaatcaatttcctaggcgtccgaattgactcaggagatattgcctatatttctaaaaaggttcgccagcaattagatgaggctggttttacaaatgctaaaatctacgcttctaatgacttggatgaaaataccatcctcaacttaaaaatgcaaaaagcaaaaattgatgtttggggtgtaggaaccaagttaattacagcttacgatcaaccagcacttggagcggtatacaaaattgtctctgttgaaaacgaagcaggagagatgatcaatactatcaagctttccaataatgcagagaaagtttctactccaggtaaaaagcaagtctggcggattacgagccgtgaaaaaggtaaatcagaaggtgactacatcacttatgatggagtagatgtttcacaactgactgaacttaaaatgttccatccgacttatacctacattaataaaacggtccgaaactttgaggcgattcctcttttagtggatatttttaaagagggtcaattggtttatcaactaccaacattatcagaaattcaagaatatgctcgtaaaaattacgatcaattatgggatgaatacaagcgcgtcctcaatccacagcattacccagttgacttggccaaagatatttggcaggataagatggatctgatcgaggaaatgcgtaacaaggccaatggagaaggagaagcaaaatgagtttgcaagaagagattatccaacaattgggggtcaagcctagcattgatcctcaggaagagattcgctactctgttgatttcttaaaaagatatctaaaaaaacatcccttcttgaaaacatttgtattagggatctcaggaggacaagattcaactcttgctggacgattagctcaattagcaatggaagaaatgcgcgcagaaacaggagatgcctcctatcaatttattgccgttcgtcttccttatggggtacaggcagatgaagcagatgcacaaaaagctttgacctttatccagccagatgttagcctggttgtgaatatcaaggagtctgctgacgaaatggtacgagcagtagaagcgactggaacagaggtttctgattttaacaaaggcaatattaaggctcgcagtcgtatgattgctcaatatgctctagctggagcacgtagcggagcggtaattgggacggatcatgctgcagaaaatattactggtttcttcacaaaatttggagatggtggtgcagatattttaccccttttccgtttgaataaacgccaaggaaaacaattgcttaagtccttaggagccgatcctgctctttatgagaaaatcccaacagcagatttggaagaagaaaaaccaggaatagcagatgaagtagcgctgggtgtcacctataatgaaattgatgattacctagaaggaaaacaagtgagtccagaagctcaagccactattgaaaaatggtggtacaaaggccaacacaaacgccacttgccaatcacagtatttgatcatttttgggagtgagacagaaatcggtaactcgtagagttcgatttcgtagtctcacccccgcaaggctgtctagatttgaaaggtgctcaaagagctccgttcaaatctagacagctactgcgtcaatgtatcgttgaaaaactcatagatgaggtggagacaaatagaatttttctattaatactagacagaaatcggtaactcgtagagttcgatttcgtagtctcacccccgcaaggctgtctagatttgaaaggtgctcaaagagctccgttcaaatcagccagctactgcgtcaatgtatcattgaaaagttcatggatgaggtggagacaaatagaatttttctattaatactagacagaaatcggtaactcgtagagttcgatttcgtagtctcaccatacaatattgtgaaaagtatcaaaaagaagggcggtttcatccgctcttttcttctagattaaagtaaaaaatttgcaaagttcaagttgcatgaaagaatgaagggagacaatctatgaatcatcttggaagtcttgtcatagagacggagcatttatacttgaggcctttcgttttggaagatgcaccagcgatgtttgaaaattgggcttctgatcctgaaaccctgaactatgtcacctgggatgcccatacatcttctgagagaaccagagaatcgatcaaaagatggattgaacagtatcttaaaccagatacttataaatgggcgatctgtttgaaaacatcaccggatcaggtaattggagatattagtgtggtttctcaagaccaggaaagtcaatcatgcgagctaggttatatccttggtaagaaattctgggggcagggattgatgacagaagcgctcacagctgttttgaatttcttattgaacgaagtcggatttaaagaaatcaaagccacttatgtcagtttaaatcctgcttcagggaaagtcatgaaaaaggcaggaatgcagtatgtagaaaccatccctcatgccattcaacgcaaaggatattgcggggataaaatcatctattctatacagaatccctctctatagggtgatttttacttgaagattctgctcaaaggattataatagtagataacgaaaaaaggagattactatgtcagaattaacgaaagaatatacagaccagctctatgctaattatgaagcaaatgtgaaatatgcggctcttgaaaatgctgttacccacaatgggatccatgcatcgcttgaaacgcgcaagagtgcagtagaaaatacaccagttttttcacttgatttgaccaaggataaggtgacaaaccaaaaagcatctggacgttgttggatgtttgcggctttaaataccttccgtcacaagatgatctcaagcttccaattggaggattttgaattgtctcaagcacatactttcttttgggataagtatgaaaaatcaaactggtttttggagcaagtgattgctacagcagaccaagaattgaccagccgtaaggtggcttttctcctacaaacccctcaacaagatggtggtcaatgggatatggtggtatccctctttgagaaatacggagtggttccaaaatcagtttatccagaatcgatttcttcaagcaatagccgggaattgaacacctacctcaataaactcttgcgtcaagatgcgcaaatcttgcgtgatttgattcattcaggagcagatagtgaggtagttgcgagcaagaaacaagcgctgttgcaagaaatttttaacttcttggccatttccttaggattgcctccacgtgaatttgactttgcataccgcgataaggacaaccaattccatagcgaaagtggcttaactccacaaagcttctacaaaaaatatgtagaccttcaattagacgattacgtctccattatcaatgccccaactacagataagccatatggaaaatcttacaccgtagatatgctgggcaatgttgttggtagccatccagtccgctacctaaatgttccaatggatcgattgaaagaattagccattgctcaaatgaaagccggagaaactgtctggtttggttcagatgtaggccaagtcagcaaccgtaaagccggaatcttggcaactgatgtctacgattttgaagcaagtatggacattcatttgacacaagacaaggcgggtcgcttggactatgcagaaagtctcatgacacacgctatggtcttgacaggggttgatttagacgaagcaggtcagtcgcgtaaatggaaggttgaaaattcatggggggacaaggtcggtacagatggttactttgtggcttctgatgcttggatggatgaatatacctaccaaattgtggttcgtaaagaattcctaacaccagatgaattagcagcctatgaagcagaaccaattgtcctagcaccgtgggatccaatgggagctttagcaaaataatcaatccaaaagagcccttgggctcttttttgtcctctaaaaaacaaaaaagttcacaggaaggatggtccttgctgtgaactagaatatattattcgttatgattgttagagtcttgtgaagaaggctcagttggcttagatggattttcttcgctagaagagcttgaagaagattcttcagtagaggattcttcagttgaataacttggttcatagtagtagttattgtaattattcttaccattgtttaaatagaggtaagaaccatttcgataaagaccactaggttgtgtccagtccgtatgaccggaattattattatttgcaagatagagcatcatttgacgataaacatcagttgcaacctgcattccattatccaatactggtgttaatcgatttgaataaccagtccagacggccatagaatactccggagtatagccgacaaataattcatctggcgctacaatacttgaataacttgagttctttgttaatttgtttaattcattgtcagagtaatttgaagtaccggtcttcccagcttggtaaactcctgaaatagccgcatttgtaccagtaccagacatgaggactgtcttcatcatatcagtcatcatgtaggccgtcgtcgctttcatagcgcgggttccttcagaatcaaactctttagtcgttccatcactaaagacgactcggttaacgtagcttggtttataataggtaccaccatttgcaaaagccgcataggcagcagccattttttcactgctggctccgtatttgttgctcgaatcactagtgttacttgagatggcattcgcgtaaaccatttcgggatagtcgattcctaacccatttaggaatttcttagcttttttaaggccaactttttcaagtgctttgaccgcaggaacgttacgagattgttggatcgcataggtcatggtaatgctaccatagtaagaacggtcccagttgtaaaccggtgttgatgaatgagggaaattgtatggcgcatctgtaatcgtagcggcagtagaagtgtattcctcatgctcgagagcaggtgcatagtctgaaatcggcttcatagttgatccccaatcgcgattagtttcaaccgcttggttggtaccaaaggaaacattgctagattggtgacgagaaccgagttgggcaacaactttaccagtattgacatcgataactgttgaagctacttgtaattcatcatccgggtagttgacatattcatctgtgttgtagatatcccaaagtttcttttgcgcttcggtgtcaacatttgtataaacatccatcccagttgtgagcaaattgtaacctgtttcttcttcaacttgctcaataacttctttcagatagttatccatataggctgggtaactgcttgaagaactaagactttgcagaccatctgtaacaggtgtattgactgccgcttcgtattgtttgttagaaatggtcttcatctcaagcatttcttttaatactaagtttcggcgttgttgtgctgcttcagggtgggagtatggatcgtattgatttggtgcttggggcatccccgcaaggagtgccaattgagggagcgaaagatcttttagatctttcccgtagtaactttttgcagcggtctgcattccgtagttcccattcgccataaatactttattgacgtaataggtcaagatttcttgtttggttgctttcttttccagttgagttgccaaccaagcttcttggatcttacgagagagggtacggtcagaggccgaggtggagaaataagttaatttaatcaattgttgcgtcaaggttgaaccaccttgacttcctcctcgcaagttgtgaaggaaggaaccgccgatccgaataatatcgaccccacggtgattgaagaaacggtggtcttcaatcgctacgatagcattgaccaaatcagtagggatttcattagtggaaacattgattcgtttctcagctcccaagtctgcaattaagttattttggttgtcatagatcttacttgatgttgttgcaaccaaatctttttcagataaggttggggccttcattgcataatatccaaatatcagcccaccgaggacgaataaaagtaaaaagaatgaaatggctgcgatggcaacatatttcaaccactgaatgactgtttgtttattcatttaaataccgcctagaagtttctgttcgataatatcaagataaggaacgcttggtagtcgattcttatccactagaaagccatgctcctgaatataggagaggggcatagacttactgccgtgatcaatgttgtaaaagcgaattaatgcaggagcagggagtaagtaggtatcgttaagttttgcaaaatgtaatagaacgaaacagataccgccttgcaggacaaccgcttccatatgatcgatctgatgttgatggaaatttttcatcggcatggactgcttttgctgtgtctccttagcttcaaaatcaatatagcgtcccttgtatactccagaatagtccgtcgttgaggcttgtctaaagtatgcttcaacaatctttgcacgactgcgtcgtggataatccactttcacgatttgaattggagttggtttcttgtgaatgaccgccaggcctcgagaaagataatattgattactttcgttgatcattttttcaaatgtcataccacgattcgcaaaatcgatcggatgcttcctttgagtagagaccgtgtttttgggggctactttatgtggatagttgaccatagttctccttattggtacaattacatcactctattatatcataaattagaataatgaggaaaaaatgaataccatacttgttgcaggttataaaaattttgatgtgggagtcttttctaacaaagaccctcggttgaccattattaaaaaagccattgaaagggaccttcgacgtttgtttgaagaaggagtgaaatggctggttttttctggtaatttgggatttgaggcttgggtactagaagttgcctttcaattaaaaaaggattacgattttcaaatggcgacgatcttcttgtttgagaatgttggtgaaaattggaatgaagccaatcaggaaattttagcacgtttcaaacaggtagattttgtgaaatatgcctatcctcattatgttagtcctggacaattgaaggagtacaatcaatttttgttggggaatgtagaaggagcttatattttttatgatcctgaaaacgaaacaaaattaaactatctttatagaatgatgttagagaaagaaacattttatgtcaaaagattgagttttgatgacttgaatgattttgctgaaaatttttacgaaaactaagtgttataccttgatttttctcaccatttttttatataattgaattgataaactagattggagagagtgatggcaagtattatttttaccgcgaaagatatttttgatcaagattttaaaagagaagtccgcggatacagtaaagatgaagtaaatgaatttttagatgatgtcataaaagactacgagacatatgcggcactagtgaaggaattacgtgaagaaaatactcgccttcgtgaagaaattgctaagaaatcacaggctgcaccacaagagactccaattgctagtacagcaagacaagaatttccacaggtgacaacagctacaaactttgatattttgaaacgactaaatcgtttagaaaaagaagtttttgggaaacaaatcgtagatcgagatttctaatttttgaaatcatgcaatttttggataatcgcgtgagagattcttccctcatgaggaaagtccatgctagcacaggctgtgatgcctgtagtgtttgtgctaggtgaattcataagcctagggacttgatgttcaagttacggcgggtgaaagagctaagtctttggataggttctagtaactctgaaagtgccacagtgacgtagtttttagggaaacctaaaaagtggaacgcggtaaacccctcaagctagcaacccaaactttggtcggggcatggaatacgtggaaacgaacatagtattctgactggaaacagtagacagatgattatcgaaggaaatggtacctagtcatttctggaacaaaacatggcttatagaaaattgcatataggttggtgaggtggagagagatctcaacctccttttttaaagtgataggaataatatgaaaaaacattttgaattgatcgcaacagcagctgctggtttagaagcagtagtaggacgggaattaagaaatcttggttacgattgccaggttgaaaatggacgggtacggtttcaaggtgattctcggacaatcattgagacgaatctctggttgcgtgcggctgatagagtaaagatagttgttggtagttttccagctaaaacttttgaagaactctttcaaggtgtctttgctttggattgggaaaattatttgcctttgggtgcacgttttcctatttcaaaggctaaatgtgttaaatcaaaacttcataatgaacctagcgttcaggcaatctcgaaaaaagcagttgttaaaaagttacaaagacattatgctcgaccagaaggggttcccttgatagaaaatggggcagagttcaagatcgaagtatcgattctcaaagatcaagctacggttttgattgatactacaggcagtagcctcttcaagcgtggttatcggactgaaaaaggtggtgcaccaatcaaggaaaatatggcagctgctatccttcagttgtcaaactggtacccagataagcctttaattgatccaacatgtggttcgggtactttttgtattgaggcagcgatgattgcacgcaacatggcgccaggtttaagacgtaccttctcttttgaggagtggaattgggttgacgatcgtctgatacaagaagttcgtacagaagccagtaaaaaaatcaatcgagacctggttttggatattatggggacagatattgatgcgcgaatgattgatattgctaaagagaacgcacgaaaagcaggtgttagcagtgatatcacttttaaacaaatgcgtgttcaggatcttcgttcggacaagatcaatggggtcattatttctaatcctccatatggggagcgattatccgatgatgtaggtgtgactaagttgtatgctgaaatgggacaagtatttgctcctctcaaaacctggagtaagtttatcctaaccagtgatgaaagttttgaatctaaatacggtagtaaagcagataaaaaaagaaaactttataatgggactctgaaagttgatctctaccaatattttggagaacgtgtaaaacggcagataaaggcatagaaaggattcttatgacagagaaggacaagaaagcattagagcaagaaacggaatcgattttagattttgaagatgccaaagagatgacgatcgggcaggccaatcgaaaagcagaagaaatcgaagcaggtgtgacagaaggtgataatgtcttagataaatacatcaaacaacaccgagcggaaatcgaagcggataaatatgatacaaagatgttggccaaagaagaattggagaaagctgaagagttggcagcttcagaaacagttgctgaagtggctgaagcagtggaggcaccggaagtaacggaaacggtcttggaacaaagacctgaaatggatgctatctcaacagagttaccagctaagattaaatttggccctacatcaaccgaaccaattgaagaagcagaggaccttcctgaggaaattccaagcaatgcgggtaaacgaatcaaaacggttctatactctgtattaggtcttgcgattgtcggttcggccatttttgtgacctataactggatgcatagtcgtggaacatctggtggtactacagttgtatcgtcttcatctagcaagtcatcttctacttctaaatcaagtagcagtgaaacacaagctcaaaaactagaagagtttaccaaagcctatgatgccttttttgtagataaatcaaaaagtggtcttaaaaatgataaattcggagacttggaaaacctgaagaaactgctggacaaattagaaggaagcagtgattataatacggctaaaacaaaatatgaagaccttgtgaagcaagtttctgccattcaaaaagtgaattctcaatttagttcccctgtcatcaaagatggagttcttgatgcaaatgccaaagcaaaaagtgatgctacgtttgcagaaacaaagacaggcaatgaaaaattagatagcttattgaatgaggcagttgcgcaaggacgttcacaacaggttgcgacaccggccccagtgacaggaacaggtggtacagaagcttcgaatgcaactccagctccagctgtaaatgctactacaagtggtgcaggaactgcaagtccaggttattcaggctatggtcttccaagcgatggtgttccactacagcggaacttgagtcgtgtgccgtataaccaagcagctatcaatgatgtcaataatccggcttgggtatttggtgatggtatccttgaaaaagtattgaacattgctcgtaaacgtgggcatatcactggcaatcaatacattttagagcgtgtcaatatcattaatggtaatggctattacaacctcttcaaaccagatggaacctatctctttagtatcaatgccaagactggttatttcgtaggaaacggaaaaggtcattcagatgctctggattattaatgtatgagtagacataccattttggggaaagattacaatagaaaagagagtgggacagaaatcggtaattcgttagaattcgatttcgttgtcccacctccggggctgtaaaagctgatgaaatcagcgtagtagagcccactcaaccactgcgtcttgctcgacaatccaaaaataattgagaggctaggacttttgtcccagcctcttttctgagtattaaacaagatggcgttcaaatggatcatcagagattccttgatctagaatcaagcgacaccattctttagctgagaagagactgtgatccttgtaatttccacaagactcaatggttgtacctggaacgttctcccaagtactgacagatgcaatttcttccaaagagtctttgatcactttagcaatttcagtactagaatgtttcccccacatgatcatatgaaaaccggtgcgacaaccaaatggtgaacaatcaatcataccatcgatgcgtttgcgaataagcattgcaaggaggtgctcgatcgtgtggagccctgcagttggaatcgcattttcattgggttgcactaagcgaatatcaaagttggagatgatgtctcctttgggtccagtttcctcaccaatcaagcgtacatagggagccttcacagctgtgtggtccaattcaaaactttcaacaattacttcttttgtcatactctattccttctttgtttttcttgattatagcataaaaagcaatttcaacaaagtagaaatagatgaatttttctgagcagtttttaaagaataagagggttgaaattagaagaaagaaacaagaatttagcaaaaatataataggttaatcttgtttttttagattgttaaatttagtaatttatggtaaaatgtaaaagaatttttaattcaactaattaaatagatttggggtaaaagcatgaattttgttattacaggtgtttttgccgcggtcattggtttagtcattggatatgtgggaactgcacttaaaatgaaagcttcaaaagaagctgcggaactcacccttttgaatgctgaacaagaagcaacgaatttacgtggacaggctgaacgtgaagccgatttaattttaaaagaggcgaagcatgagtcaagttcacttaaaaaagaagcacttttggaggcaaaggaagaagccagaaaatatcgtgaagaggtcgatgctgagtttaagtcagaacgacaagaattgaagcaattagaaagccgtttggcagaacgtgctagcaatcttgatcgtaaagacgacattttaacaagcaaagaacagtctcttgaacacaaagagcaaagtcttacagatagaactaaacacattgatacgcgtgaacaacagctggaagagcttgaacacaagaaagtagaggaactggaacgtgtcgctgctctaagtcaaggagaagcgcgtgacattattttgaatcagacggaagagcaactttcaaaagaaattgcctcacggattcgtgatgctgaattggaagtgaaagaacgttctgataaaatcgcaaaagacattcttgtccaagccatgcagcgaatggcgggtgattttgttgctgagcaaacaaattcaacggttcatttgccagacgatagtatgaagggtcggattatcggtcgtgaagggcgcaatattcgtacctttgagagcttgacgggtgtcgatgtgattatcgatgatacgccagaggtggtgaccttatcaggatttgatccgattcgtcgtgaaatcgcccgcatgacaatggaaagccttctcaaagatggtcgcatccatccagcccgtatcgaagagctggttgagaagaaccgtcaggaaattgacaaccggattcgtgaatacggtgaggcggctgcctatgaaattggtgcgccaaacctccatccagatttgatgaaaatcatgggacggttgcaattccggacttcttatggtcaaaacgttttgcgtcactccattgaagttgccaaactttctggtattattgctagtgagttgggtgaaaatgctaccttggcacgacgtgcaggattcttacatgatatcggcaaggcgattgaccgtgaagtggaaggaagtcacgtcgagattgggacggaattggcacggaagtacaaggaacacccagtggttgtcaatactattgccagtcaccatggtgatgtggaacccgaaagtgtcatcgcggtcattgtcgctgcagcggatgccttgagtgcggctcgacctggggcacgaagtgagtcgcttgaaagctacatcaaacgcttgcaagatcttgaagaaattgcaaatagttttgaaggagttaagacaagttttgcccttcaagcgggtcgtgaaatccgtattatggttagtcctgaggcaattaaggatgataaagtgacgatcttagctcatgatattcgtgagaagatcgaatccaatcttgaatatcctggaaacattaaagttacggttattcgagaattgcgcgcagttgattatgcaaaataattagaaagcttgagattgagcatctcgagctttttgttttaaaaaaatcagttgaaaattaggtcaatttttgttacactagatagaaagacattgaaggagatatcatggcggatcgtggcttattaatcgtattttctggcccttcgggggttggaaaaggaacggtcagacgagaaatttttgaaaactcagataatcagtttcaatactctgtatcgatgacaacgcgtgcgcaacgtccaggtgaagtggatggtgtcgactattttttccgtacacgtgaagaatttgaagatttaatccgtcaaggacaaatgttagaatatgctgagtacgttgggaattactatggaactcctctgacttatgtgaatgaaaccttggacaaaggaattgatgtattccttgaaattgaagttcaaggtgcgctccaagtgaagaagaaagtacccgatgcagtttttatcttcttaacgccacctgatttggatgaattgcaagatcgattggtgggacgtggaacagatagtgcagaagtgattgcgcaacggattgagaaagccaaagaagaaatcgctatgatgcgtgaatatgactacgcgattgttaatgatgaagttcctcttgcagctgagcgtgtgaagcgtgtgatcgaagctgagcacttccgtgtagatcgtgttattggtcattatctggatatgttacctaaaacacagacaattgtgatgagataaataattagaaaataggtgtaggaatatgatgttaaaaccttctattgatacgttgcttgacaaagtaccatccaaatattcattggtcattcttgaggcgaaacgggcacatgaattggaaagtggtgcagttccaactcaagaatttaaatcagtgaaatcaacattacaagcgcttgaagaaatcgagtcgggcaatgtggttgttcaccctgacccagaagcaaaacgtgaagctcttcgccgacggagtgaagctgagcggattcgtaaagaagaagaggagcgcaaaattaaggaacaaattgccaaagaaaaagaagatggtgaaaaaatttaaggttgggagcttctcaatcttattttttgctatttaaagggttccgtgataaagtaaagcacatataatagaggctggaggtgaaaaagtgatcgcaaaagtaatcgtagatgtcccattgatgcagacggataaaccgtattcttaccagattccatcagaatttgaggatatgatagaggcgggaatacgggtccatgtgccctttggtaaagccaatcgattgattcaaggaattgtgatcgaagtattggaagttatggatactacagaggaattgaaggcgattgtagaagtcttagactacacacctgtcttaaacaaagaacagttctggttggcagatcaattgcgaaaaagtgttttttcatataagataacaattttaaaaaccatgcttccctctctcctcaattccagttacgacaagattttgtatcctcagccgtcattggatctagcaaccaaagtgaagctttttggtaaaaaaaatgaagtcgctttttcttctttagatgtagctgatcaagctctagttatgcgcttggttagaaaaggcgatttggtattagaatacaaggccaaggataagaaacaaattaaaacagaaaaatggtatcgcattaaccaggaacgattaaaagaacttcaaccttcagcgagagctaaaaaaaggctagcattgaaagagcacctgttactagagcaaggggagcaacctttagcaggactgtatcaggatttttcacgagaagtagtggcttattttattgatcagggtgttttagaaattactgagcgagaagtgaatcgggcggcaacttattatgaaagaaaagaacagtcccaagccctgcttttaaatacagagcagtcaaaagctgtggaaacagttgtttctcagtttggaaaaacatcaaatccttttttattagaaggagtgactggaagtgggaaaacggaagtttatttgcagattattcaggaagttctaaataaggggaaaacggctatcatgttggtccctgagatttccctgacaccacagatgacagaccgttttatctcgcggtttggtcaggaagtagccattctacactcgggcttatcaaacggtgagaagtatgatcaatggcggaaagttgaacgtggggaggccaaggtagtcgttggagcacgctcagcaatttttgctcctttaaaaaatataggagccatcatcattgatgaggagcatgaggcatcctacaaacaagatagtaatccacgctaccacgcaagggatgtcgcagtcttaagggctcagtacaatcaagcagtcttgcttcttggatctgctacaccaagtttagaatcgcgagctcgtgcaacaaaaggggtttatgaattaattcgtctaacccagcgggccaatccggcagccaaaattccagaagttaaagttgttgatttccgtgattatattggccaaaatgaagctggtaacttcactcctgttctagtggaagctattgctgaacgcttgcagaaaaaagagcagattgtcttgatgttgaaccgccgtggttattccagctttgttatgtgtcgcgagtgtgggactgtggatacttgtcctaattgtgacatctctttgaccctccatatggataccaaaactatgaattgccattattgtggttatagtaaggcaattcctcgacactgtccaaattgccaaagtccttccattcgttattacggaacaggaacgcaaaaagcctatgatgaattacaagagatctttcctgaggctaaaattttgcgcatggatgtggataccacccgaaaaaaagggagccacgcagcaatattagatgctttcgggaatggagaagcggatattttgttagggacgcaaatgattgctaaggggctggattttccaaatgtgacgttagtgggtgtcttgaatgcggatacttctttaaatttaccggattatcgatcctcagagcgaacctttcagcttttgactcaggtggcaggaagggccggacgagcagagaaagaaggagaagtcatcattcagagctacaaccccaatcattatgcaatccggtttgctaaagaccaagattatgaaggcttttttgcctatgaaatgcagattcgccggcagttgggctatacaccgtattacttcacagttgggttaaccctgtcgcataagagtgaggaaattgtgatggagaagtcacatcaggttatggaaatcctccgttctggcttatccgatcaggtccaaatcttaggaccaactcctaaaccaattgcacgtacacataatttgtatcattatcaaattattgtgaagtatcgtttcgaagaaggtatgacacaggtattgaatcaaatcttagaatttacccaagaaaaagggaataaagatctgcgtctgagtattgataatgaacctcaaagtttcatgtaaggaagaaaaaatgacaaaattaatttttatgggaacacctgatttttcagcgaccgttttaaagggcttgttagcagattcgcgttatgaaattctagcagttgtgacgcaaccagaccgcaaagtaggtcgcaaaaaggagattcgaatgaccccagtgaagcaggtagctttggaacatcaactaccggttcttcagccggagaaattatcgggtagtccagaaatggaaactctcttatcactagatgcagatggaattgtgaccgctgcttttggacaatttttaccgacaaaattgttggagaacttccaatttgcggtgaatgtccacgcgtctttattgcctaaatatagaggtggagctcccattcactatgctcttatcaatggtgatgaagaagctggggttacaattatggaaatggtcaaggaaatggacgctggagacatgattgcagctcgttctctaccaattttagatgaggacaatgtaggaaccttgtttgaaaaattggctgtccttggacgtgacttactcctagatactttgccagcttacctggcaggggagatcaagtcaagtccacaagatccaaatttggtcacattttcaccgaatattttgccggaagaagaggttttggactggaccaaaaccaaccgccaagtctttaatcagattcgagggatgaatccttggccggtggctcatacgttattaaatggtcaacgctttaaagtctacgaagcagagctatgcgaaggaaatggaaatcctggagaagtgattggtttgagcaaaaaagagttgctggtagctgctggagaaggttcactgtcccttaaagttgtgcaaccagcaggaaaacctaaaatgtccatcacagactttttgaatggcgcgggtcgtcaattgaaattaggagatcgctttggaagttaaacaaatgaatgcgcgtgaacagatcgttcgagtcttggaagaagtctttgaacacggggcttattccaatattgccttgaaaaaaacgctagaacattcccagctttcggataaggatagaagctttgttacggaagttgtttacggtacagtagcacggaaaataacgctcgaatggtatctctctcacgtgatcgaagatcggacaaaattggatccatgggtctattatctcttaatgatgagtttgtatcaactcgtctatttagaccgaattcccgatcatgccatcgtcaatgaagccgttcggatagcaaaaagccgtaaagaaggcagtgagaagtttgtcaatgctattcttagaaagcttctccgcgagggactaccagctgttgatacgatcaagcgaaagaacaaacgttattcggtgcagtattccctacctgtatggttggttaaagcattgatcgaagaatatggtgaagaacgtgcttgtgctatttttaaaagtctttatcagcgtaataaatccagtattcgtgtcgttgatctgagtgaaaaagaaaaactcgctcaggagttggaagcaagtgcatccctcattgcttcttctgccctcgtgaaagatcagggacattttgcggcgcactccttgtttaaagagggccggatcaccattcaagatgaatctagtcaattggtggcaccggccttggatttacaaggcgatgaatgggttttagatgcctgtgcggcaccaggtggaaagacgactcacatcgcttcttttcttacaactgggaaagttacagccttagatctgtatgatcataaactgaaattaattcaagaaaatgccaatcggcttcatgttgcagataaaattttgacaaagaagttagatgcgacaagagtttttgaaacatttggaccagatgcattcgataaagtattggtggatgcaccctgttctgggattggactgatacggagaaagccggatatcaagtacaataaagaaagtgtagattttgtctctttacaagccattcaattagcaattctggatagtgtttgtcaaagtgtgcgtaaaggtggtataatagtgtacagtacgtgtacaattatagggaaagaaaattttgaagtggttgatcgttttttaaaaagtcacccaaattttgaacaagtcccattggatcacaaaagaaaagatattctcgaaaataactgtattctgattacacctgaattgtatgaaagtgatggattctttatcagttgttttaagagaattttataacatcaggagggaactgacagtatggatatttctatcttaaccgatgtaggtcaaagacggacaaataaccaagactatgcaaatcaatataaaaataaggctgggaaatctatgatttttctcgctgacggtatgggaggacaccgtgccggtaatattgctagtgaaatggcagtcacagatctgggtgctgcttgggtttcttctgaaattgaaacagtgaatcaagtacgtgaatggtttgcaaatcatttagaggatgtgaatcgtcggattcatttagcaggtcaagatgacgaacacaaaggtatgggaaccacactagaggccttggctttcgtggaaggacaagtgatttatgctcatgttggagactctcgaattggccttattcgccacggtgaataccggcaattgacaagtgatcattctcttgtaaatgctcttttacgtgctggtcaaattacagaggaagaggctgctcatcatcctcagcgaaatatcatcactcagtctattggtcaaaaggatgagcttgagccagattatggcttggtcacggttgaagcaaatgattatattttgatcaatagtgatggattaaccaatatgcttggtccagatgaaatcagagatattattttgagtgatgtttcactggaagaaaaggctaaaaccttgattcgttttgccaataatgctggaggtttggataatattactgttgtattgctccactttaatgaggaggacgcagcatgattcaaatcggcaaaatttttgccgggcgatataaaatcatccaacaaattgggcgcggcgggatggcagatgtttatcttgcgcgtgatttgattttagatggtgaagaagttgcagtcaaggtactgcgtacgaattaccagacggatcccattgcagttgctcgttttcagcgggaagcaaaagcgatggcggaactggaccatccaaatatcgttcggattacagacattggcgaagaagaagggcaacaataccttgcaatggaatatgttgcaggtttagacttgaaacgctatatcaaagaaaatgcacctttatcaaatgaagaagcggttcgtttgatgggacagattctccttgctatgcgtctagcccatacgcgtggcattatccatagagatttaaaaccacagaatgtcctcttgactccggatgggactgcaaaagtttcagactttgggattgcagtggcctttgcagagacaagcttgacccagaccaactctatgttaggatcagtccattatttgtcacctgagcaggcacggggatcgaaagctacggttcaaagtgacatttacgctatgggaattattttctatgagatgttgactggacacattccttatgatggggatagtgcggttacgattgcactgcaacatttccaaaaacctcttccctctattcgtgaagaaaataagaatgttccgcaagctttagaaaatgttgtgatcaaagcgacggctaagaagctgacggaccgttataagtcagtagcagagatgtatgtagatctttcaagctgcctgtcttatgagaggagaaatgagaaaaagctggtttttgaagatcaaacaaaggctgatacaaaaactcttccgaaagtgagtccgactccaaagaccgctccagttccaatctctgaggtgcgcagtgaaatcagttcggtggatccaaaacggccattatccaaccagcaggtcgtggcaccaaataaaaagccaagaagacgcttacgtgcacgttataaagtattgtttgttgcaatcgcgctagttcttgctgcctttaccttcttgttgtatatgagtccagccaataaaacagttccggatgtttctggtaagactattgctgaggccagagcgattatcgaaggtcaagatcttcaagttggtgaagaaaaggaagaatatagtgatactgttgcggaaggctatgtcattcgaactaatccaaatgcgggagctcaaaagagggaacaaagtcgaattgatttgattgtttcaaagggaccaaatagctttgaaatgccaaattatgtaggagaaacgagggcaaaagcagaggatgatctgaaaaatacttataaagtgtcaagtaagatgatcagtatagaggaagttgaaacttttgactatgatcctgggacggttattgagcaaacaccggcagcaggtgagcaatattctttgaattcaaaaactaagattgtattaaaagtagcaaaagaaacaacttcaattgaaatgccaaactatattggatcaacctatgatttcgcacgtagcaatttgattgaaatatatgacatcaaggaagccaatattgaattaagaaaaacggaccatcttcctgatggggttgttgtttctgcggggcaaattgtgagtcaaactcctgaggcatctaatacagtggatattaatcggaccagaattatattgacagtgtatgagcctaaagtgacttcttcttcaagtacgaaagcttcttcaagttcagaaacgtctagttcgtcttcatcagatcgaaaggataccgatagttcaagtagtagtgcagcagatgatgattaggaaattgattgcaagaaaaagttaggtaaaaactcaatctgagaaaataggtccataaatatttccataataaaacgcataatatcagtatatatagatacctgatattatgcgttttatagtttcaaacacattttgtttgcccttctattcttacctgtttttattttcacgtcgtgatttttatatttcacctaagagggaaaatatttgagttttataatattgatttttataaaaatcttaataatacagcatttaaactattttttcatggagttaagctagtgaatgtaatttaatttgagaataaaaataattgaacatcaaaccatttgctttttattatgaatctatgctacaatctgcatgagaggaaatcaaagattgaaaagccggtcggaactaatttaatagagagttatttcttcagaaaatttctatccattatttgaataggccttaccaactagtggaaagaaatagtactcgctaagatagaattggaaagaacgactattgaatatgtacatatgcttgatgtaactttcatatatacttccaaatggagattattaaaatggacagaaattatagaatgctgagccgatcgattttagcaatggctgtgattgctccagcatttatagcaacaaaagtagctgcagataatagagggtggaataccaacttctacaatacaaactattatggcaatggttacaataattgggacggctataatggttataattcatggacctatggttatggctatggatatccaagttggaactattattatggctataatgactataactacaattataataactggaataattactatggttataacaatctagttcgtgacaaaaactacatttattggaatggtaatcattattatcggatgagtgatggaacttaccggatctaccgcaatggtgagtggaagcctctaactaatcggaataactctactaataaccttgccaatgaccctcattatgtatatgaaaatggctaccattattatgtattagataatggggattattattactataaaaatggtaaatgggtatttgtgaagaattcgacggaaaatcctgatccagttcctacaccgactcctgatccaactccaacacctgacgagccagatccaagcgataaacccgatcaaccagtcaacccatcagaaccatctacaccagaagatcacgggaacttgatcttcccagaaaatcctccatttgtaggagcagatggagagtttgatcctttcgcaccaaccccagaaaatccaagtgaaccaaaaccagaagaaccggtgcaacctgaagtaccaggaaatgatggtttggtatcatcagatcagcctagtgaaaaccaaattcctccatatgttgagacaccagcagaaggattagaacatcttccatgtgctccgaatggacgagcacctaagatagtctatcctcctggtaaacctggatcagcagctttgcgtcgtgataagaactactactttgacggttcgactcactattactatgttccatctgatacagaagcaactggttactctgcttattggaaatggaacggagacaaatggaaactttatggaatgacagatccgaaagatcctgagatcgatccaaaattccacgaagatgccaaagatgatgaatatgcttatagcgatcgtgactcaagcgtgaagctctactctacaaatcttgtagaaacagctaaagcgggtcaagctcttccatttaagaatgtggatgaatttaaggactatgtcattaagaaaatgaatcctaaatttattgacaatgctggctgggatgccaaagtagaatgggaaatcgaggacccagaactctttgagcaatctaaagaaaacccatgggctaaagactatgttttaatcgctaacttgaagagtggagtagatgacaaggactacaaagatgttgagtttggatatgtaaaattcgtttatcgtgtagaagcgacagacaatacaaactatatcgagttagataaagcgaaagaagcttttgctaagattaacgaattacgaaaggcacaaggcttaaaagaattgacttggtcagatgatgtctacaactcacgtgccttgccaaaagcccatactatttcacgtcagtacgatagcacagggtttgtagctcgtcgcgaagacaatgcaacaacggttgcaacgaaatggtataatagtggattgagagaattaatgctcgatccaaatgccacagaaggtgcggtagcagcagtcatcaatggcgacggtaactattattgggcattcatgtataaataatgcctctagacaaccgttatcggaaagaacttatttaataaccattcattccgataccaaggacacccaaaggatttctatcttttgggtgttttttctctctccgtattatccaaccacagacggaagtcaaatgataaaaattttgataaaataaaaaagatgaggtagactatgtggaaaatacaaatttttattttcgttgaagccattttgttaacattagcagcgatcaccattttatcaattgatttttacagatttgttgtcttaatggtacttttcttgttgcttctgtattactattttggcaaacaaaaggcgaattttctattaatcgcgctaagtgtgctcttgttttttatcgtgatgctgaatccttttgtgattgcagccattttatttgcggtggtttatggtttattgatcgcctacccctatatgtataaggaaaatggagcagttgtatttgatgttgaagaggatacggaaattcgtcaagaaaaaactcgatggattggtgatttacaacatttttcaaagcaaagtcgagggtatcgagatctgaatgtgatccgagtttttgggaatgacaccctccatttagaggaggtagccatttgcaattgggacaatgtggtgatcatccggaaaggttttggaaatacaaaaattatcttaccgattgatttggagttgcatttacaaattaacactctgtatggagatctgaagtttttggatctacctgtccgtaaaatgaggaatgaaaccatagacattgaaacggcacactatcggagatcgcaacgttctataaaaattgtgttagttggtattgttggggatgttgaggtgattcgcgcatgaagaaattagactatctcctattgtatttctattccctaatggtggttgcagtcatttgtcataccattttccattttgttggttttcagtggggcaaacttctctcagatctttccttgcttcagtcattcctatttatggtttttagtctgacgcttgcattgacggctttggttgtcttaattattaaaatcacgcaatttgtaacggttcatgcagtacaacaaaaagtagaagcgatcctatccgcttcacagcgaaaagaaattgcccccaaagaattgaatcaacagttagatttattggacagcaaattgcttcgtctagaagaaaatttacaaaaaagtgaaaatcgtgtgatgcgaaatgaggaagaaattgtggaaatcgagcgtaagagaattgcgcgcgatctacatgatacggttagtcaagaattgtttgcagccaatatgattttgtctggcgtggtagcacaggcccttgagttagagaaaagtcagatccagcagcaactaaatggtgtatcggatattctaggtacagcccaaaatgatttacgcgtcttgctcctacatcttcgtcctacagaattggaaggaaaaagtttggtagaaggtatggagatgatttttagagaattgaaggaaaagagtaacctaacagttgtcttccatcataatgacgtgagcattccaaaagatatggaagaacatctgtttcggattgtccaagaaattgttagcaataccttaaaacacgctagagctcaacaaatggatgtctttttgcaccaggaaggaaaacaacttcatttacggatggtagatgatggaatcggctttgagcaggaaaaattagaacgattgagttatggattaaaaaatattcaagaacgtgtagaagacatggcgggaaccattaaaataagaacgagtcctcaaaagggagtggctatagatattcgcgttcctctccttgtaaaagataaaaatgaaaaggaaacagtatgaaaatattattagtagacgaccatgaaatggttcgattgggattgaaaagctttttatccatgcaaaccgatattgagcaagtcttagaggcacaaaatgggcaagaaggggtggagttggcgctgaaagtaagaccagatgtcatcatcatggatattgtgatgccggagttaaatggaatcgatgcgactctagccatcctaaaagagtggccggaagctaaaattgtcattttgacgtcttatttagataacgaaaagatttaccctgtcttagatgccggtgcaaaagggtatattttaaagacctcgtcagcaactgagatcttacatgctgtccgaaaggttgcaaagggagaatttgcgattgagacagaagttagtcaaaaagttgagtcacgaaagaaccatgctgaattgcatgatgatctgactgctagagaacgagatattctggctctactaacaaaaggctatgaaaatcaacggatagcagatgaactctttatttctttaaaaacggtaaagacccatgtctccaacatcttatcgaaactagaagtcagcgatcggacgcaagctgtcgtctatgctttccgtcatcatctggtgaatcaggaagatttttaagtcaaaaaatgctataatagagcaagtaaaagagggggagataagtggacgcaaaattacgttataaagccaaaaaagtaaaaatagtcttttttgatattgatgatacattacgtgcaaaagaaacaggcttgattcctgaatctgtaaaagatgtttttcatcagttgaaaaagaagggaattttaacagggattgcaaccggcagagggatttttggggttgttcctgaactaatggatttgaagccggattttttagtcactttaaatggagcttatattgaagatgccaaaggaaatgtgatctaccaatcaccaatcaatgaagcaatcgtttcttcttttgtggattgggctaaagaatctgagattaattatgggttggtcgctagccatcaagcgaccctgtccaatcggacacctttgatcagtgatgctattgacatcatttatccgaatttaccagtagatccggatctgcatttgaaagaaccaattttccaaatgtggacctttgatgaagataatgatggtttagaattatcgccttccttacaagaggagttacgtctagttccatggcacccacattcatctgatgttgttcgttttgatcgatcaaaggcttcgggagtctctcaagttgtccatcatttggacttgaagccagaaaatgttctagtattcggtgatggtttgaatgatttagaactttttgattatgctggaattagtatcgcaatggggaagtctgctccagagctacgagaaaaagctgattatatcaccaagaatttagaagaaaatggcatattctatgccttagaggagttaaatatggttgaaaaagaattgacgttaccacagttagaacttgctacgattgaaggtcctatcgctgtgatcaaaactaattatggtgagatgaaaattaaattgttcccggatcaagcaccaaaaactgttgcaaactttgtagctcttgccaaatctggctattacgatggcatcatttttcaccgcattatcaaagattttatgatccaaggaggagatccaactggtacaggtatggggggagaatccatctatggtgacagcttcgaagacgaattttcaaaagaattgtacaatattcgtggagcactttcaatggcaaatgctggaccaaatacgaacggaagtcaattctttattgtacaaaatcagcatcttccatattcgaaaaaggaattggttcgcggtggctggcctgaaaaaattgctgaaatctatacgacagaagggggaactcctcacttagatcaacgtcatacagtatttggtcaattgatggatgaatcttcttttgccgtattggatgagatcgcggctgttgaaacaggtatgatggataagccggtagaagatgtcgtgattcaaaccatcgagattgaggattgatatgaaaattggagacaagttagaagggaccattacaggcattcaaccttatggagcctttgttgaattagaatcgggtgtcacgagcttgattcatatttcagagattcgaagtggctatgttagtaatattcatgacattctttcgattggggagaaggtctttgtacaagttatcgatgttgatgaatattcaaagaaagccagcctttctttgagaacgctagaagagacaccacagcgaactgttcggcatcatcgtttttcaaatgaccgccataagagtggttttgctccattagctcaacaaatgccaacctgggtcaaagaaggaaaagtattttttagcaagcaagagaaaaaataaaaaacttcgataggtttataaaccctatcgaagttttttatataaagaattattcaaattcgtaaagagtagttgaaagataacgttccccattatctggtgcaagagcaagaacttttttaccacttcctaattctttggctacctcaatcgcagcatagatagcagcagcacttgaaatgcctactaagaacccttcggccccaccaatagctcgtgcaagttcgaaagcttcttctgaagatacgcgacgaacaccatcatatgcgttagtatctaaggtatttggaataaaacctgctgaaattccttggattttatgtggtccaggtttttcgccagaaaggacagcagattcattggcctcaactgcatagactttgacagctggattattctttttcaaagtatgagaaataccagaaacagtaccaccagtaccaacacctgcgacaaaagcatctaaaccatcttttccaaaggcatcaacgatttcttgtcctgttgttctttcatgtacctctgggttagcagggttttcaaactgaagaggaaggaagccatttctttctgcaacgattgcttcagctttagcgatggcacctttcattccttcacttccaggagtcaaaacgagttcagctccatatgcttggatgattttacgacgttccacactcatggtttcaggcatgacaatcacaactttatagcctttagctgcgccaacccatgataagccaatccctgtgtttccactagttgcttcgacaattgtatcacctggtttgatcaagccatccgcttcagctttttcaatcatgctcaaagcaatccggtctttaacagatgatccaggattgaaggcttcgagtttgacatagacatttgcagctccttcaggaacaagacggttcaatttgacaatcggagtgttcccaatcaattctgtaatattttcataaatagccataatatacctcagttctaggttttcttgatactaacaagtatagtcccttgtgggaagaatgtaaaatatagaaattttatgggtgtgataaaaaaaaactatcgttgccgatagtttttttgattaattttctacagaaaggagtggtacctcaacctcgcgaattccttgatcttctataaggactttcccattataaaattcgactaaagctgctgtgatagaacgggtgtcttctttgtctacaaaaatagttgtcgccacctgatctgtaaacattggatcttgttccgccaattgattgtcttttaagaaattagcaaactcttggtattgggaataagaaagtgtgattccaagaaccacttgttccttgatttctaccagtccaatctctcgaactgcttgagccacacttccagcgtatgcacgaattagaccgccagcacctaatttaatgcctccaaaatagcgggtaaccacaacgcaactattagtgatgtgatgattttccagaactcctaacatcggtacaccagctgttccgctaggctcaccatcgtcactggtccgtttgatgtcactttgttctccaatgatgaaagcagagcagttatgtgtagccttatagtgttcctttttgatggcattgataaaatctctagcttcctcttcagaggagacacgcttgacatgacaaatgaattttgattttttgatttcttcttgaacagtaccgttctctttaaatgtaacatattccatattcatattttacaaaaaaagaatgaatttctccaacttttgcgaattaataagtatgaagatagaagatttttatggaaggctcttaacggagagtcaaatgacaaataatctaaaagaaattgcccaagaacttcctactatagaaaaacaaaatggaaggtaccaatgttttcgatgtggcagtatgattgatcaaaaactttggaagttgagtgaagaggtactgtattgtagagcctgtatccaattgggaagaatccggagtgatcaaaaactttatgctattgcacagcaagactttgaaggacaggaggtgttaaactggaaaggaaccttgacttcctatcaacaagaggtatccgatggtctcatccaagcagttaaggaagggggaaatgccttggtacatgctgtgacaggagctgggaaaacggaaatgatgtaccaggttgtagcaacagcaatcaagagtggacaagcagtctgtattgctaccccaagaatcgatgtctgtatcgaactgtacggaaggatgaaggacgatttttcctgccccatctctttgcttcatggggaatcggaaccctattttagaacgcctttggtaatcgcaacaacccaccaattgctaaaattttatcaggcctttgatctccttattatagatgaggtagatgctttcccctatgtagacaattcaatgttataccaagcagctcagaatgcgataaaaaaagaagggaacaccctttatttaacagcaacttcaacagatgagttagaaaaaaaggtcaagaaaaaagaaatcattcgttatagccttccaagacgattccatgggaacccactagtggtccctgaaataaaatgggtgccgaaagttagagaaaaaatagaaaaaggaaggatcccatacgaattattgcaactgatcaagaaacaaagacagactcgctacccattgttaatctttgtatctgaaatagaattaggtcaacaatttacagagaacttaaaaaaatactttcctaaagatacgataggttttgtatcctcacaaactacagatcgtctacgaatggtagaggagtttagaaacagagcattgaccatcctagtctcgacaacgattctagaaaggggagtaacttttccgcttgtagatgtctttgttttagaaagtaatcacaaattgtttactaaaagtgctctcgtacaaatttcaggaagggtaggtcgaagtaaagaaagaccaacaggtaaactactatttctatcagatgggataacaagagaaatgaagaaagcgattaaagaaataaaggaaatgaatcaggaggctggattttgaaagaatgtctgctttgtactaaagagttgaaaactggtgaacatttcacagaccttatttttatgaatcaacaagaagaatggatttgtaaagaatgcaaagaagacttcgaacaaattggcgaaatccattgtcctagatgttataaagataaggaggagaaagtatgtaaagattgcgaatactggatacaaaaggggagtatggtcgaacatgaagcattatatagatataatgcagccatgaaggactatttcaagcgatataaatttgaaggagatcgtttattaggaatggtatttgcatgtaacatcaaaaaagccttgaaaaagtataaaagctatacgataataccgattccaattagccatgaaaaaaagcaggagagaggattcaatcaagtatcaactatattagattttgcagaaataaagtacaacagtctattccaaaaaaaagacagcttagcccaatcaaaaaaaacaagagaagaaagattaaaaacctctcaacactttcaattaaaaggagaagtttcagaaaagcagaaatatcttatcttcgatgatatctacacaacgggcaaaacaatcgaattaatgaagcgcctactaattgaaaaaggtgtgaaagaaataaagacattttcaatcgcaaggtaaaaaaagatttgcaaaaactttatgaaagcgttataatatacatataaataaaaacataatgtttagaaagtaggtactaatatgattaaatatagtatccgtggtgaaaacctagaagtaacagaagccattcgcgactatgtcgtttctaaactcgaaaagattgaaaaatattttcaggcagatcaagagctggatgctcgagtaaacttaaaagtttaccgtgaaaagaccgcaaaagtagaagtaaccattccgcttggatctatcacgcttcgtgcagaagatgtttctcaagatatgtacggttcaattgatcttgttgtagataaaattgaacgtcaaattcgtaagaataaaacaaaaatcgaaaagaaaaatcgtattaaatctggtgcaggtaaattgtttaccgatgcagttgtagaagaagcaaccaccacagaaaaagttgttcgctcaaaaacaattgatctagaaccgatggatatagatgaagcgatccttcaaatggatctattggcacacgacttcttcatttatcgtgatgcagaagacaacacaacaaatgtcatctaccgtagagaagatggagacatcggtctattggaagtaaaagaatagagatcaaataagagattgaaaacatcaattaaatatagaggaatcgggggcatctttgctcctgattttttatgtaaacaaaaaaagtaaaaaaactttcaaaaaaaattaaaaaaagtgttgacagtaaagagaggtcatgatatactaatatagttgtcgcgagagagcgacaaagacctttgaaaactgaacaagacgaaccaatgtgcagggcactacaactgaagttgtagtaactgaacaataaaaaacaataaatctgtcagtgacagaatgagtttaagacaaacaattattttaatgagagtttgatcctggctcaggatgaacgctggcggcgtgcctaatacatgcaagtagaacgctgaagcttggtgcttgcaccgagcggaggagttgcgaacgggtgagtaacgcgtaggtaacctgcctcttagcgggggataactattggaaacgatagctaataccgcataaaagtcgacattgcatgatgttgacttgaaaggtgcaactgcatcactaagagatggacctgcgttgtattagctagttggtgaggtaacggctcaccaaggcgacgatacatagccgacctgagagggtgatcggccacactgggactgagacacggcccagactcctacgggaggcagcagtagggaatcttcggcaatggacggaagtctgaccgagcaacgccgcgtgagtgaagaaggttttcggatcgtaaagctctgttgtaagagaagaacgagtgtgagagtggaaagttcacactgtgacggtaacttaccagaaagggacggctaactacgtgccagcagccgcggtaatacgtaggtcccgagcgttatccggatttattgggcgtaaagcgagcgcaggcggttagataagtctgaagttaaaggctgtggcttaaccatagtacgctttggaaactgtttaacttgagtgcagaaggggagagtggaattccatgtgtagcggtgaaatgcgtagatatatggaggaacaccggtggcgaaagcggctctctggtctgtaactgacgctgaggctcgaaagcgtggggagcaaacaggattagataccctggtagtccacgccgtaaacgatgagtgctaggtgttgggtcctttccgggactcagtgccgcagctaacgcattaagcactccgcctggggagtacgaccgcaaggttgaaactcaaaggaattgacgggggcccgcacaagcggtggagcatgtggtttaattcgaagcaacgcgaagaaccttaccaggtcttgacatccctctgaccgctctagagatagagctttccttcgggacagaggtgacaggtggtgcatggttgtcgtcagctcgtgtcgtgagatgttgggttaagtcccgcaacgagcgcaacccctattgttagttgccatcatttagttgggcactctagcgagactgccggtaataaaccggaggaaggtggggatgacgtcaaatcatcatgccccttatgacctgggctacacacgtgctacaatggctggtacaacgagtcgcgagtcggtgacggcaagctaatctcttaaagccagtctcagttcggattgtaggctgcaactcgcctacatgaagtcggaatcgctagtaatcgcggatcagcacgccgcggtgaatacgttcccgggccttgtacacaccgcccgtcacaccacgagagtttgtaacacccgaagtcggtgaggtaaccttttaggagccagccgcctaaggtgggatagatgattggggtgaagtcgtaacaaggtagccgtatcggaaggtgcggctggatcacctcctttctaaggaaaaggaaccctgtacgttggtcttgtttagttttgagaggtcttgtggggccttagctcagctgggagagcgcctgctttgcacgcaggaggtcagcggttcgatcccgctaggctccattaacactatagtagtgttaagcttgaacattgaaaattgaatatctatatcaaatagtaacaagaaaataaaccgaaacgctgtaaatatttaaagagtttaggtcgtaagaccaaaaataaggttaagttaataagggcgcacggtggatgccttggcactagaagccgaagaaggacgtgacaaacgacgaaatgctttggggagctgtaagtaagcgacgatccagagatgtccgaatgggggaacccactagctaatggctagtactcctatctgttaaggataggtagaggaagacgcagtgaactgaaacatctaagtagctgcaggaagagaaagcaaaagcgattgcctgagtagcggcgagcgaaacggcaggagggcaaaccgaagagtttactcttcggggttgtaggactgcaatgtggacataaagagtatagaagaatgacatgggaaggtcagccaaagagagtaagagcctcgtattcgaaatagtctttatacctagcagtatcctgagtacggcgggacacgagaaatcccgtcggaatctgggaggaccatctcccaaccctaaatactctctagtgaccgatagtgaaccagtaccgtgagggaaaggtgaaaagcaccccgggaggggagtgaaatagaacctgaaaccgtgtgcctacaacaagttcgagcccgttaatgggtgagagcgtgccttttgtagaatgaaccggcgagttacgatatgatgcgaggttaagttgaagagacggagccgtagggaaaccgagtctgaatagggcgcaatagtattatgtcgtagacccgaaaccatgtgacctacccatgagcaggttgaaggtgaggtaaaactcactggaggaccgaaccagggcacgttgaaaagtgcttggatgacttgtgggtagcggagaaattccaaacgaacttggagatagctggttctctccgaaatagctttagggctagcgtcgacattaagattcttggaggtagagcactgtttgggtgaggggtccatcccggattaccaatctcagataaactccgaatgccaaagaattatggtcggcagtcagactgcgagtgctaagatccgtagtcgaaagggaaacagcccagaccaccagctaaggtcccaaaataattgttaagtggaaaaggatgtggggttgcacagacaactaggatgttagcttagaagcagctattcattcaaagagtgcgtaatagctcactagtcgagtgaccctgcgccgaaaatgtaccggggctaaaacaatttaccgaagctgtggatacctttataggtatggtaggagagcgttctatgtgtggagaaggtgtaccgtgaggagcgctggaacgcatagaagtgagaatgccggtatgagtagcgaaagacaggtgagaatcctgtccaccgtaagactaaggtttccaggggaaggctcgtccgccctgggttagtcgggacctaaggagagaccgaaaggtgtatccgatggacaacaggttgatattcctgtactagagtatgtagtgaaggagggacgcagtaggctaactaaagcgtgcgactggaagtgcacgtctaagcagtgaggtgtgaattgagttaaatgcttaattctgtaacattgagctgtgatggggagcgaagtttagtagcgaagttagtgacgtcacactgccaagaaaagcttctagcgttaatcatactctacccgtaccgcaaaccgacacaggtagtcgaggcgagtagcctcaggtgagcgagagaactctcgttaaggaactcggcaaaatgaccccgtaacttcgggagaaggggtgctggctttgagtcagccgcagtgaataggcccaagcaactgtttatcaaaaacacagctctctgctaaatcgtaagatgatgtatagggggtgacgcctgcccggtgctggaaggttaagaggagtgcttagcgtaagcgaaggtatgaattgaagccccagtaaacggcggccgtaactataacggtcctaaggtagcgaaattccttgtcgggtaagttccgacccgcacgaaaggcgtaatgatttgggcactgtctcaacgagagactcggtgaaattttagtacctgtgaagatgcaggttacccgcgacaggacggaaagaccccatggagctttactgcagtttgatattgagtgtctgtgccacatgtacaggataggtaggagccatagagatcgggacgccagtttcgatggaggcgttgttgggatactacccttgtgttatggccactctaacccggtaggtttatcatctacggagacagtgtctgacgggcagtttgactggggcggtcgcctcctaaaaggtaacggaggcgcccaaaggttccctcagaatggttggaaatcattcgtagagtgtaaaggtataagggagcttgactgcgagagctacaactcgagcagggacgaaagtcgggcttagtgatccggtggttccgtatggaagggccatcgctcaacggataaaagctaccctggggataacaggcttatctcccccaagagttcacatcgacggggaggtttggcacctcgatgtcggctcgtcgcatcctggggctgtagtcggtcccaagggttgggctgttcgcccattaaagcggcacgcgagctgggttcagaacgtcgtgagacagttcggtccctatccgtcgcgggcgtaggaaatttgagaggatctgctcctagtacgagaggaccagagtggacttaccgctggtgtaccagttgtctcgccagaggcatcgctgggtagctatgtagggaagggataaacgctgaaagcatctaagtgtgaaacccacctcaagatgagatttcccataactatatgttagtaagagccctgagagaagatcaggtagataggttaggagtggaagttgtgtgagcaatggagcggactaatactaatagctcgaggacttatccaaagagtcagaagatattgacaaagttaggtttagtttgttagaatatagatattcaattttgaatgtttaaacattcagagttaagtgacgatagcctaggagatacacctgtacccatgccgaacacagcagttaagccctagaacgccggaagtagttgggggttgccccctgtgagataaggaagtcgcttagcaagagattgagcctagatgatctaggctcatttgggagtttagcttagttggaattgagaggcaatcgagattccaatcggcggataagagaaacgaagtttctcaccgttggctgagttaaacgaccatttgggagtttagctcagctgggagagcatctgccttacaagcagagggtcagcggttcgatcccgttaactcccataggtcccgtagtgtagcggttatcacgtcgccctgtcacggcgaagatcgcgggttcgattcccgtcgggaccgttaggataatgaaaattattttaagactcgttagctcagttggtagagcaattgacttttaatcaatgggtcactggttcgagcccagtacgggtcatattttgcgggtttggcggaattggcagacgcaccagatttaggatctggcgctttacggcgtgggggttcaagtcccttaacccgcatagaagaataataatgagccggcttagctcagttggtagagcatctgatttgtaatcagagggtcgcgtgttcaagtcatgtagccggcatttttttatataaagaaagcaatgcgaacgtagttcagtggtagaacaccaccttgccaaggtgggggtcgcgggttcgaatcccgtcgttcgcttgaggaggccggggtggcggaactggcagacgcacaggacttaaaatcctgcgattggtaacgatcgtaccggttcgattccggtcctcggcatagacaaagtttgaaagaagcacccttagctcaactggatagagtacctgactacgaatcaggcggttagaggttcgactcctctagggtgcatggtcgcaaggctatgtaataattgaataggaacgagcacccttagctcaactggatagagtacctgactacgaatcaggcggttagaggttcgactcctctagggtgcataaagcggtagctttagatcgggaagtagctcagcttggtagagtacttggtttgggaccaaggtgtcgcaggttcgaatcctgtcttcccgatagtgtattgaaaaagtctaatggttgtcattaggctttttttgtagttatttctttattaatttacaagaaaaaagagctttcgctcttttcaactttatttatttcgcagttcaacataacggttataccaaattttgatatattcctcagaaaaaggacctttgttttggtttatccaatctactaaaaccttaacattttcttttaaaataaagtcgatgtcatctgaatagtgcattttttctttatgctgctcgtattcttcaacatctaacaattttttttcaccattggtaaagaccttgacatcgagatcatagtcgatatattttaaggcttcttggtcaatgtgaaaaggacttgctaggttacagtagtaagacacaccattgtcacggatcatggcgatgatgttaaaccaatattttttatggaaatatacgatcgctggttcacgtgtaatccaacgtctaccatcactttcagtaacaagtgtatgatcatttactccaataattgcattttcggttatctttaataccatggtgtcacgccatgttcggtgtaaactgccatcatgtttataactttgaattgtaataaagtcgccttctttaggtagtttcataacttaccaactttctacaatctaagtatatcctctatattgtatcatattttttcaaattttttcttattttactatttaattttcaatttggtttatgaatctaagtattctctaatggctgacgttatatcactataatcgtagccttttctggctagtgcctgagtcaagcgttgtttgaggtcatagccttcatattttttactgtatttacggtattgtttttctaactcttttagaatgagctcattggttgtttcttcatctgtttcgagctcgagattttggaatgctatcttcgcttggttgtatgtaaagccttttgaaatgagtccttggatggttttcgtttcaatagcttttaacggatatttcccttggtatttttttaggagttttattgcggtacggtcgatcacttctgagaaatcatagtctgcaagaatttcttgaaggatagattttggtatccctttttgttgaattttttgttgtaataagagagggcccttatcgccactgagaaggttggcctctatcaagtttcttgcatattgacgatcatctaaccacttgtcttcttttagggcttggatgacttgtggtatgattttctcatcaatctcatgtttaactaaatagtctctgacttctttttcagtacgggccttgaaggataagtggtagagcgccaagttttttccgtaggaaaattgtgcaaaggtttgaatttctgtaaactcttgaggactaatttccttatccttggtcaacataaagtgaacaatggtatcctctgtaatatagcaggtttggtcgctatcaagttctagcaggtagagacgttttttcttttctagttttgtgattttcatggttttccttttatccaaacgcttcaaaggcagcaacgagtcgaagtttatttatatcgacctgttctctcccataatagtcaagaaatagttcagcgtatttcgggtcatgtaggttatagttgagggaccaaactgcccaaaagagatcgatatgtcggtcactgaaatcagctaagccaaggtcaataaaacaagagaagtggtcagcatcttttagaataaggttcggtagacaggcatccccgtgaataaaggcgtctgtctttaaaaggtgcccttgttctcgaatgagctggaaggcctcttcacgactgctaatccggaattggggtaggagagccttggcatagaactcacctttttcatagttttttaaggctctgtctttataggcctgtaaatgattttctgatggaaaattttgcggataaaagctgtgaagttttttaagagcttcggccatggttcggcagattttttctggctggtctaaaaaagcgagagtatcatgaccaatagcctctttagtcaggaggtagtctttatctgtagatagatagtggatgactggagttcctattccctcttgttcaaacaaacttgcaattctagcttctcgctctaatcttcccttttgatctattttcaaatagtaacctgaatcaagatagagaaccgttgcgcctgaatgagaagagttgtcagaaagagttgctccctctatataagttcgtaattgctcaggaaaatccaatggggaaaaatgagatatctttgtattcatggttttattgtaacatattcttaaacattgagaaactacgtggtataatagacttatgagtcttaaagttaaacaaaaaattccattaaaaatcaagcgtatggggattaacggagaaggaattggcttttataaaaaaacacttgtctttgtgccaggcgctttgaagggagaagatatcttctgtcaaattacaagtgtcaagaaaaattttgcggaagccaaactcctatctgtgaataaggcgtctaagtttcgggtgacgcccatgtgtgatatctatgagacctgtggtggttgccaaatcatgcatttgaagtatgacaagcagctggaatttaagacagatttattgcaacaggccttgaagaagttttcacctgaaggatttgaacagtatgatattcggccgacaattggaatgcaggagcctctttactatcgtgcaaaattgcaatttcaaacaaggaaattcaagggccaggtgaaggcaggactctatgctcaaaattcacattatttagttgaattaaaagattgtttggttcaagatccggtcattcaagctatcgccaatgatctagcggatttattgacctattatcagattccgattgctgatgagcgtaaagaactgggtgtcagaaccatgatgattcgacgggctcggaattctggtcaagttcagatcattgtggtcactagtcgtcagattaacgtaaagaatttggtggaagacttggtcacgaaataccctgagattgtcacagttgctgttaacaaaaatacgtctcgttccagtgagatttatggggaacaaacgcagattatttggggagaagaggccatttgggaaggtgttttggattatgaattctccctgtctcctcgagccttttaccagttgaatccggaacaaactgaagtattgtatagtgaggctgtcaatgctctagatgtttctccagaggatcacctgattgatgcctactgtggggttggaacgatcggatttgcttttgctaatagagtgaaaagtgttcgggggatggatattattcctgaagcgattgaagatgccaaatacaatgctaaacggatgggatttgagaatacccactatgaggctggtacagcagaagagatcattcctcgttggtaccaagaaggctatcgggctaatgctgtgatcgtggatccacctcgtacgggcttgggtacaaaattaatcgagaccttgttgcagtatgcacctgaaaagatggtctatgtctcttgtaatgtctctactttggcacgggatctagtggctttgacgaaggtttatcaggttgaatacattcaatcagtggacatgttcccccatactgcacggacagaagcagttgtgaaattagtgaagaagtgaaagaagaagaatggatatttgggaaaaactttatcatgaggcgaaagatctctatgcgcctcatgaggtttcagattttgtctatgctcgacatgtggtcgctgctgttgaggctgcagatggtcagatttatacgggcttttgtatggaaggaacctgtggcgtctttcatttatgtgccgaacgggcagctcttttcaacatgtatcaacaatcaggacaaaccaaggtcaagcgtattattgcttttcgagacaagcctccttatggagaaggttcagggatgccttgtggggcctgtcgtgaatttctccttgagttaaatgcagagaatcgttatctagaaattatggtggattatgaaagtcgtaagaccattactttaggtgaattgatgcctctttggtggggagaagaacgggctcgtcagagagagaataaagggaatgagtagaggaaataaataaatggacaatgttattgatgtatcgattccagttgctcaagttattgatcaacatccggaggtattggatttgttggtggagttgggctttaaacccttagccaatccgatcatgcgcaatacagttgggcgcaaggtttccttgaaacaaggatcaaaattagaaggtacccctatggagaagattgtgcgaaccctagaggctaacggctatgaagtagtggggctagaccaatgagtgatgaacgaattcacgtcttaagagatatcttattagagcttcatcatggagcctctcctgagtcggttcaggaacggtttgatgcgacctttgcaggggtttctgcgattgagatctctcttatggagcatgaactgatgaactcagatgcaggtgttacttttgaagatgttatggagctttgtgatgtccatgctaatctctttaagaatgcggttcaaggggtcgaagttgcagatactgaccatccaggtcatcctgttcaaatctttaaacaggagaacttagctcttcgtgcggctatgatgcgggtacgccgcttgctagacaattatgagacgactgaggatcctgagatgattcaggagattcataagggcttgttacgtcagctgggcttagtgggtcaatttgaccggcattaccgtcgtaaggaagagttgatgtttccgattatggaaaaatatgggcatgattccccaccaaaagtgatgtggggagtggatgaccagattcgagaactctttgcgaaagctttggatgcggccaaaaaattaccggattctagtatttctgaagtcaaggagctctttgaagcctttgcgcaagagtttgagggcatgatcttcaaggaagagtcgatcctcttgatgattttgctggaggcctttactcaggatgactggctctccattgcagaagaaagtgatgcctatggttatgccattattctcccaagtgagaaatgggtgccgaaacgcgttgacttcaaggaggaagcgttgaaagagtcagagggttcaactgaaccgcttccttcttcaaaaggcgatgagcaacgtcaggtcattgagactcctgaggggcagttgacgattaccttcacgcctaagaaaaaagaagagagcttcgatcgcaagcagccacaggcttttggccatggctttctatcggtggagcaagcgaatttaatcttgaaccagttaccaatggagatcacctttgtcaataaggatgatattttccaatattacaatgatgctgcgccttttgaggaaatgatttttaagaggacgccatcgcaggtaggacgcaatgttgagctgtgtcacccaccgaaatatttggagaaggtcaaagccatcatgcaggggcttcgtgaagggaaaaaagacaagtatgaaatgtggttcaaatcagaatcgcgtgggaaatttgtccatgtcacctatgcagccgtgcgtgatgaagctggagagtttcaaggagtcttggaatatgttcaggacattcaaccttatcgggagatcgatacggatttttatagaggaatggagtaaagatgagttacgaaacagagtttatgaaagagtttgaggagtggatcaagactcaagtcatgatcaatgaaatggctctcgaagaaagtaagaaggtttttgatgaagatcaggatgagcgagctaaaattgctatgattcgctatgaaagccgtttggatgcttatcagtttttgcaagggaagtttgaaaatttccatgctggaaaaggatttcatgatttaccagatggcctctttggtgaaagaaaatactagaaggtgattattgaaggcgttttactagctagatttacctgaaaatcgagcaatgacttgattttttaggggattgtgttacaataaaaaagttgaaatgacatcaacggattattgaatggaataatggtgatgaaaccttgttgccttagggattgatcactgaatttaggaggaaaaatggcaaagaagaacgtaaaccgtgcgaaacaatacaaacatcaaaatagacatcttttgaaaaaagctgtcgcaactgtaactgcagctgtgaaagaagcacctaaaaaggttgaaaaagctacaaaagcagtggcgaaagaagtgaaacaagtggcttcttcagtggaagaatttgctgcaagtttggaaggtgtggcacttgatcgtgcgcaaacattctatgatgaaggtattcgctctgttgcggacttcgcaaactggacagaaaaagagttgttggcccttaaaggaatcggcccagctacgatcaagaaattgcaagaactaggcgttaaatttaaataatcgcttttgtgatttcttgctatttcaaggaaaacttgctaaaatgaacctattagaggtgttttgaatcccacattttacagaaagtggcagtgctgagaagtccacaaatgtgtcaaaactggttgctaatggatgaaaatgaaatattaaatagtctttttgttttaaagatgagagatgcgggcatctgcccgaaattgggtggtaccgcggattaatacattcgtccctgtcagattgatgacaggggcgatttttctttttgcaaccctggctgaaggagcttgtcatgaaacaatcttttaacactagtaaactctactatggctttcctatcttcatcttggggtatcaggaccagaactttgggaacaatatcacgacctgcagttcctcttatagcttgggagattggctggtcatcggagttggtgctgaggaaaatgcggctgatcagattaagcattatcaactgttcactttgaatatccctgacgaaaaactcatgcttgagatggaacaagctggctttatcagccatcgggagaaattgaaacacctagggctagactatgagatttctgaacggactcaggctccgattttagaagcttgtccagtcgttttggattgccaggtagatcggattatcgaggaagatggcatctgccatatctttgctaagattcttgagcgactggctgatccagagctcctagatgacaaggggcattttaaaaatgaccgttttgctccgacttactttatgggggacggccatcagcgtgtttaccgttatctagatgaccgagtcgattccatggggtgctttatcaagaaagcgaggaagaagaatgacaagagctgaactgccagaacgaatcgaaacggagcgtctggtcttacgagtccgaacagtggctgatgcagaggatatccatgcctacgctagtctcccagaggtttcttacccagcaggttttccacccgtcaagaccttggaagatgagatttattatctggaacatatccttcccgagcgcaatgaaaaggataatctcccagcaggctatggaattgtggtcaaagggactgataaaatcatcggctctgttgatttcaaccatcgccacgaagacgatgtgctggaaattggctataccttgaaccccgactattgggggcgaggctatgtgcctgaagcggcgcgtgccttgattgatttggcttttaaagaactgggacttcacaagattgaattgtcttgctttgggtacaaccttcaaagtcaacgagtcgcagagaagcttggtttcactctagaagctcgcataagagaccgcaaagatgcccaaggcaatcgctgtgatgatttgagatatggcttgctgaagagtgagtgggaaactcaaggtcaacattagaaataaaaataactagaaaggacacacacatgtctaaagaactttcatctaaatacaatccagccgaggttgaggctggtcgttaccaaaaatggcttgacgaagatgttttcaagccttcaggcgataaaaaggcgaagccttattcaatcgttattccaccaccaaacgtaactgggaaactccaccttggtcacgcttgggatacaactcttcaagatatcatcatccgtcaaaaacggatgcaaggtttcgatacactttggcttccaggtatggaccacgcagggattgccactcaagctaaagtagaagcgcgtttggctgaagacggcatctctcgttatgaccttggtcgtgaaaaattccttgataaagtttgggaatggaaagacgagtatgccactactatcaagcaacaatggggcaagatggggctttctgtagactactctcgtgagcgttttacccttgatgaagggttgtcaaaagcggttcgtaaggtctttgtagagctttacaagaagggctggatctaccgtggtgaatttatcatcaactgggatccgaaagcccgtacagccctttctgatatcgaggttattcacaaggatgtcgaaggtgccttctaccacatgaactacatgttggaagacggttcacgtgcccttgaagtagcaacaactcgtcctgaaacgatgtttggggatacagccgtagcggttaacccaaatgatgaccgttataaagacttgattggtcaaaatgttatcttgccaatcttgaacaagccaatcccaatcgtaggggacgaacacgcagaccctgaatttggtactggtgtggtgaagatcactcctgcccacgaccctaacgacttcttggttggtcaacgtcataatcttccgcaagtgaacgttatgaacgatgatggtaccatgaatgaattggctggtgaattcaatggcatggaccgctttgaagctcgtaaggctgttatcaagaagttagaagaaattggtgcccttgttaagattgagaagatgacccattcagttggtcactcagagcgtacaggggttatggttgagccacgcttgtctacgcaatggttcgtcaagatggatcaattggcgaagaatgccattgccaaccaagacacagacgataaggtagaattctacccacctcgtttcaacgacaccttccttcaatggatggaaaatgtccatgactgggtaatctcacgtcagctctggtggggtcaccaaatccctgcttggtacaatgctgaaggtgaaatgtacgttggcgaagaagcaccagaaggtgacggatggaaacaagatgaagatgtcttggatacttggtttagttcagccctttggccattctcaactatgggctggccggatgtcgactcagaagacttcaaacgttacttcccaacgtcaaccttggtaacaggttacgatatcatcttcttctgggtatctcgtatgatcttccaatctttggaattcactggtcgtcaaccattccaaaatgtccttatccacggtctcatccgtgacgagcaaggacgcaagatgtcgaaatctcttggtaacggtatcgacccaatggatgttatcgagaaatacggtgccgatgcccttcgttggttcctttcaaacggttctgcaccgggtcaagacgtgcgtttctcttacgagaaaatggatgcgtcttggaacttcattaacaagatttggaacatctcacgttacatcctcatgaacaatgaagggttgaccttggatgtggcgcgtgaaaatgtagctaaagtggctgttggtcaagcaggtaatgttacagaccgctggattctccataaccttaacgaaaccatcggcaaggtcactgaaaactttgacaagttcgaattcggtgtggctggtcacattctctacaacttcatctgggatgagtttgcggactggtatgttgagttgactaaggaagtgctttatagcgacaatgaggacgaaaaagtcatcactcgttcagttcttctttacaccttggatcaaatcttgcgtctccttcacccaatcatgccatttgtgactgaagaaatttacggccaaatctctgaaggaacgatcgtgactgcggaatacccagtggttcgtccagagtttgaaaacgaagaagcagcagctggtgtagaagctcttaaagatgtgattcgctccgttcgtaactcacgtgcagaagtgaacgtagcgccaagtaagccaatcactatcttgattaagacaagcggcagcaagctcgatgccttcttcaatgacaatgtcaactacatcaaacgcttcacaaacccagaacacttggaaattgcagcagatgtagaggtacctgatttggttatgtcaagcatcatcacaggtgcagaaatctacttgccactcgctgaccttctcaatgtcgaagaagaattggctcgtcttgaaaaagaattagccaaatggcaaaaagaactggatatggtcggtaagaagctctctaacgaacgcttcgtagccaatgccaaaccagaagtcgtccaaaaagaacgcgacaaacaagccgactaccaagccaagtacgacgcgacagtagcacgtattgatgagatgaagaagttggtgaaataaacacagaaacacggcggtatgccgtgttttttgtatgattctgtaagagaaaaagtttaagtaacctatttttagaccattttccagaaataatcgatgatataggtgagaccgtaagtgtagatgacaagggtgataggtttgcagaagatgatgatggtcatgtagcgtttgaaggtcatcttcgtcagacctgccagcatacagatgaagtcagcgggactaaccggccagatcatcatgaagataaagaagcgatcgaaccgcttgccttcattgagccagccaatgtacttgtcatatgtcttctgactgaccatggattggacgaacttaggcccgtacattctcgcaaggtggaaaataatggcacagccgattacgatgccgatgtagttgtagatggtcccaatgatgtggccgtagatgaaaacacctgctacagatgtcagggcgccaggaataatagggaccactgtctgaaggatctgaagaaagataaagagaggaggcccgaagattccggcttgcaaaataaaagctgacaaggtttctttggattgaaggatgccagaaaagtaggcccagatacaaaaggccaaggttgcgagggccccaatgatggatgaccaattgatgattttttggagaagaggagagacctccctcaattttttttcttttgttatcataactcttccgtgtatttttttcttctactataccatgtttttggaactttgtaaggattttgtctattttttgagtagtgaaagcgacctgatcggagtctgtcgctgttttagtcgtgaagcgggtgcaaaatgggcctttttatgctacaatgaaaggagtataaaaaatggagaaaaacgtgtcaatcgaaaattacaaaccagattttgcggtggaagcagcctatgatctcaccgttacagacttgaaaaaacagggtattaaggcagtccttgtggatttggataataccttgattgcttggaacaatccggatgggactcctgagatgcgccagtggttgcatgaccttcgtgatggagggattcgggttatcgtggtgtctaataatagtcccaaacgggtcaagcgcgctgttgagaaatttgatattgactatgaagcttggtcgcttaagccctttacctttgggattgatcgtgccctcaaacgtttccactatgagaaaaatgaagtggtcatggttggggatcaactgatgacggatatccgggctgcccatcgtgcaggcattcgttcgattttggtcaagcctttggtcgagcatgactcgatcaagacgcagatcaaccgggcgcgtgaacgccgtgttatgaagcaaatggccgagaaatatggtccgattgtatataaaaaaggaatttaagaatggaagaattattctgtattggctgtggagcccccattcagacagaaaacaaagaggggctaggctatactccccaatcagctcttgaaaagggcttggaaacaggcgaagtctattgccaacgctgtttccgtctccgtcactataatgaaatcacagatgtgcatctgacagatgatgatttcctaaagctccttcacgaagtaggggatagtgatgctctcgtggtcaatgtagtggatatttttgactttaatggatccgttatccctggcctgccacgctttgtagcagggaacgatgtcctcttggtcggaaacaaaaaagacatcttgcccaagtctgtcaaggacagcaaggtgacccattggttgatggagcgggcccacgaagaagggatgcgtcctgtcgatgtggtcctcacctctgctcaaaacaagagcgcgatcaaggacttgatggaaaagattgagcagtaccgcaaaggccgtgacgtctatgtggtgggtgtgaccaacgtagggaaatcgaccctcatcaatgcaatcatccaagaaatcactggagacaaggatgtcatcacgacctctcgcttcccagggacgacactggacaagatcgaaatcccactggacgatgggtcctatatctatgatacaccagggattatccatcgccaccagatggctcactacttgacggcaaaaaacctcaagtatgtcagccctaaaaaggaaatcaagcccaagacttatcagctcaatccagggcaaaccctcttcttgggtggtctgggacgttttgactttattaagggggaaaagcaagggttcactgccttctttgacaacgaactcaagcttcacagaaccaagctagaaggggcgacggccttttatgataagcatgtcggtggcttactaactcctcctaatagcaaggaaaaagaagaattcccgcctttgatttcccatgagtttaccatcaaggacaagacagacctggtcatctcaggactcggctggatccgcgtcaatggagaagccaaagtagccgtctgggcaccagaaggcgtcgccgtcgttacccgcaaagctattatttaaaaaaacgggaaaaaatatatctgaagagcgaacaaagtgagctcataaagagatcgttattgccgtggtgtagttgccaatcgatcgattggcaagggcaaaatggggaccaaggctccattttgaggtgaggaaatccatttttcaaagatgagatctttgaaaaattagttccggccgtccccaccacttaaaataacgatcaagaaaaaaggaagtaaaaacatgacattaacatccaaacaacgggctttcctcaacagccaagcccacagcctcaaacccattatccaaatcgggaaaaacgggctcaatgaccaaatcaaaaccagtgtgcgccaagcgctagatgcgcgtgaactgatcaaggtgactcttcttcaaaatacggatgagaacatccatgaagtagcagaaatcttggaagaggaaatcggtgtggaaacggtccaaaagattggtcggattctcatcttgttcaaacaatcgagcaaaaaagaaaatcgtaaaatttcagcgaaggtaaaagaaatctaggacatcgaggagagcaaacctatggcaattgaactattgactccctttaccaaggtagagttagagccagagatcaaagacaagaaacgcaaacaagttggtattttgggtggaaatttcaatccggtccacaatgcccatttggtcgttgcggatcaagtgcgccaacaattagggttagataaggtgctcttgatgcctgagtatgagccgccgcatgtcgatgccaaggggacgattgcagagcatcatcgccttaagatgctggaattagccattgaaggcattgaaggtctggaaatcgagacgatcgagctcgaacggaaaggcatttcctatacctacgacactatgctcttgctcaatgaacgggatccagacacagattattacttcattattggtgcagatatggtggattatttaccaaaatggcaccgcatcgatgaattggtggagattgtgcaatttgtcggggtacagcgaccacgctataaggcggggacttcttatccggtgatctgggtggatgttcctctcatggacatctcctctagtatggtgcgtgattttgtggccaaaggccggacgccgaattttatgttgccaaaaccagtcttggactacatcaagaaagaaggattgtatcaatgacctatgaaaactatctaggcttttctcgtgaggtcttgcttgaaaaaatgcgtcaaatcctgccagaaaagcggctaactcactgtttaggagttgagaaggctgcgcgtgacttggccaaacgctatggggctgatgaagagcaggctggactagcaggtttgttacatgactacgccaagaaattatcagatcaggaatttctggacttgatcgatcgctatgagctggatccagcattaaaaaactggggcaacaatgtatggcatgggatggtcgggatttataagatccaagaagacctcggactgacagatccagccattcttcgcagtattgagattcacaccgtggggagtggacaaatgtcaaccttagacaagattgtctatgtggcagattacattgagcacaaccgggccttcccgggagtggatcaagcacgtgatatcgcccaagtctccttggatcgtgccgtggcctatgagacggctcgcacagtcgaacacctagctcaccaaggattgcccatttatccccaaacccttgaaacctacaatgcctttgtgaagtatttgaaagaggagcagtgagtgaagacagcttttatcattattgacgtacaaaatatcttagtggaaacaggttttgagaccgaaaagcttctggagaagattgcttatttacaagaacaggctagaaaacagcagattgaaattatttacatgcagcatattgaaacgcctgaggctttaacttcggaagattggcaattatcgcccctgttgaaaagacaggcgaatgaaaaggtatttcagaagcgatacaatagcatatttaaagagacaggattaaaagaatacttggatcaacaagggattgaacaactggtcctgtgtggtatgcagacagaatattgtgtcgatacatccgtcaaagtgggatttgaatacggctataagctgatcattccagaaggagttgtcacaacctttgatggagaggatattccggcagaaacgcttaatgaattttatgaaaatatttgggcagaacgttttgcggatgtcttagattacaaatcaattttttaaggaaagaggactaaatgaaagaaaaagaattacttgaacttgttgttaaagctgccgatgaaaaacgtgcagaagacattgtggctttggatgttcaaagcttaaccagcgtgacagattactttgtcatcgcaagctctatgaatagccgtcagttggaagcgatcgcagagaatattcgtgagaaagtcgttgaagctggtggcaatgccagccatgtcgaaggtgactcagctggaggttgggtccttcttgacttaggtggtgtggtggtccatgtcttctcagaagaaatgcgtgcccactataacctagaaaagctatggcacgaagcaagtgctgttgatctttcagcagccctagcataagcaggtaaactcagttggtagcaactgagttttgttggttaaattgaaattctatggaaagaaaggatggggcctcgtgtttggttgttttcttaattgaacacgagctaaaagctgtgagaaaaaaagtaacttcctttgtatctgatgatacggcagaaagttccctattttctctatgcttttaacgctccttgtatcttagaaaggatttgaacccgtcctgtaatcctcggaaaatagatagcactccttggagcttagctccatcgtcgtgctcctaattttctatcggattacgggcggacttggtatcatgaatatggcgacttatgaaacgtttgcggcggtctacgatgcggtcatggatgatagtctgtatgatttgtggacggatttttctctccggcatctccctaaaagcaaggatcggaaaaaattactggaattggcttgtgggacagggattcaatctgttcgcttttcccaagctgggtttgatgtgacaggattagacctgagtgctgacatgctgaaaattgctgaaaaaagagctgcttcagccaggcaaaagattgattttatcgagggcaatatgctggacctgtcacaagcaggcacttatgactttgtaacctgctactcggattctatctgttatatgcaggatgaggtggaagtaggagacgtctttaaagaagtgtataatgccctcaatgaggacggagtctttatctttgatgtccattcgacctatcagacggatgaggtgtttccaggctattcttatcatgaaaactcagaagactttgccatgctttgggatacctatgaggatgcagcccctcactcgatcgtccacgagctgaccttctttgtccaagaagaggatggctcctttagtcggcacgatgaagttcatgaggaacgcacttatgaagttttaacctatgacatcttattggagcaggctggctttaaatcctttaaactctatgcagactttgaagacaaagagccaacaaagaccagcaaacgttggttttttgtagcacagaagtaggatagcatgacagttacaggaattattgcagaatttaatccctttcacaatggtcacaagtacctgctggaacaggcagaagggctgaagattgtgaccatgtctgggaattttgttcaacgtggcgagcctgccattgtagacaagtggattcgcgcgcagatggctttggaaaatggagcggatctggtggtcgagctcccctttctcgtggctgttcagtcggcggatcattttgcaaagggatcggtagaaatcttgtcccgtctaggaatcgaccaattgacctttgggacagaagaggtcatagattaccaagcgattgcaactatttactctgagaaagaagtggaaatggaagctttcttgcgaagtcttccagacgatttatcctatccacaaaagacccaaaaaatgtgggaaacccttgctggagtggagttcacaggagatactcccaatcatatcctgggtttggcctatgccaaggcttgtgctgggaaggggattgcgctcaaggctatccagcgccagggagcaggctaccattcagaagaaaaagaggtagcttatgcttctgcgactagtctacgcctacacaaggaagatcaggactttgtcgctagattcatgcccaatagccaactctttcagtcggctccacaggtatcttgggagaattatgaccaactgctccgttatcaaattataacccatccggatctgacacagatttttcaagtcaatgaagaactggccaatcggataaaggatgcggttcgaagtgctagttctgtggaagacttggtggagaaagtcgccaccaagcgctataccaaggcacgtgtccgtcgtatcttgacctacatcttggtaggggcgatagatcaggctcttcccgatgccattcatgtcttaggattttccgcaaaggggcaagctcacctaaaaggcttgaaaaaatcagtagaaattgtgactcgaatcgggaaggaaccttgggatagtttgacccagcaagcggatcaggtgtatcagctaggccatccccaattgccagagcagatctggggtcgggtgccagtgagagtggaagaataaacaatctgacgtaaattttctctgtccacattcacgtaaggcaagaagtttatgatgtacggaaatagtgtttatctactgtctaaaaattccttttagacagtagatttttttaccaaatttagaaactttttacgaataattaggtagagtgggaaaacttgtacaagttcctgacaagtttttctttttcatgtataataatagaaaagaggtagaatgaggtatggtcatggaagcagtcgtttattcaacattccgcaatcatttgaaggattatatgaagaaggtgaatgatgagtttgagcctttgacagtcgtgaataagaatccagacgaagatattgtggtcatctctaagagcgagtgggacagcctacaagaaaccctgagactagctcagaacaaggaattgtcagataaggtcttgcggggcatggcagaagtccgagctggtcaggttcaactccatgagattgaggggtaacggatgttactcaagtttacagaagatgcctggaaggattattgttacttgcaaagtcaggacaaaaaaacactggagcgaatcaatacccttatcaaagagatccaaagggacccatttgcagggattggtaagcctgagcctttgaaatatgactttcaaggagcatggtcaagacggattgatgcagagaatcgcctgatttatatgctagatgagtcaggtgtcgctttcctctcttttaaagatcattattaagtctttaaaagaggatctttttgatagttaggatagctatttaaaattcccaactcgaagaaaattcctataaaatcccctttctaaaaatagaaaaatctagtctaacttcgacgatttgtgatataatgttaaagattgaaaataatttgaaaaaatttaaggagaatcctcatgggacgtaaatgggccaatattgttgccaagaaaactgccaaagatggtgccaactcaaaagtgtatgccaaatttggtgtggagatctatgtagctgctaaaaagggtgaaccagatccagaactaaatactgctttgagattcgttattgaccgtgcgaaacaagcgcaagtgccaaaacacgtgattgataaagcgatcgataaggcaaaaggaaatacagacgaaacctttacagaagggcgttacgaagggtttgggccaaatggttcgatgttgatcgttgataccttgacgtcaaacgtcaaccgtacagctgccaatgtccgtgctgcctttggtaaaaacggtggtaacatgggagcttcaggttctgtatcttacctctttgacaacaagggtgttatcgtctttgctggtgatgatgccgatgccatctttgagcttttgcttgaagcagatgttgatgtagatgatgtcgaagcagaagaaggaacgatcacagtctacactgctccaactgatcttcacaaagcgatcgttgctttgcgtgaatcaggtgtcgaagaattccaagtaacagaattggaaatgattcctcaatcagaagttgagttgtcaggtgaagatttggaaacatttgaaaaactttacagcgttcttgaagacgacgaggacgtacaaaaaatctacacaaacgtagatggattctaatcactcataaggactgtagtgaatcccataaattaagaaaaaggatagcttctcagatcaagctatcctttttctctgtctgatgaggatctatcttttgtaagtgatgtcctgtataagcgtaaatacgggtcaggggtgattgggagagtgtggaaatcttaaaatagaaataatggtctcgatgatcccgacttttagtatggtgaagacgaaagtagtttcgctggcctgctgccatagagtggagaatatcgtcttctaaaaagacgagcggcgtagaagtagcggcccacttgtaaaagtctatctcaaattggtggtaattctccgaaaaataatcaaattgtaattcgtgtttagtctgaataggtttcatagggtgtttcctcagattcaataaaaatgatagagtctacgaggagacggtggtagtggccatcgcttttgagaagaacctcagaagcagataaggtgtgaatcgaacctgtgtaggttgcaaattgattcccctctagagtcgtgatcgagatcgtcgtttgttgttgaaaggcctgctccaggagctggatctgctcaacaagtggaagaatcgtgagctgactgtggtcaatttcttttgtatgcagggcagttgtgtgctcggataaaaagaagccggcccatttggccatgccacgatcttgaaattcgcgggcggattgataagggagataagaacggtcgatcatgttaatccatctaagcctcctgcggaatgtccgcctgttagtttactgcgtgcaatggcgcgtgagttttctagtagtgaggagcctttctgaagagaggtgaagccaaattggtcccgaatgcggtcaatggtctgctgaagtttctcctctttttccagggctactgggtcatcaaagagagaaaagagttgaagagactcctcgacaagttctccataaaaaacaccaatctgccgaatggcgcctccttcgtacttggagcgaaagagtcgcagaaccgtatcggataaaaccttggtggattgggtgggctcaatcttttgctggcagtgaatggacggaagtccctcgattttggagtaggaggcatgaatggagaccagctgggtcttcttttttttccgtcgcaagcgaatagccacctgttcagccatctcccgaaataccagttcaatgtcggtttgtagatggtagtcatagggcaagatttgagagttgccaatgcctcgtgatttcggacgataaggcttgtggacattgctttcatcaatgccatgagaatgaaaccacagttgaaggcccatgattccgaattctttctttaagagatctgggtgagcctgggccagttcagcaatcgacgtaatcccgattttttgcaatcgcttttcagtacgacgtccaatgccccaaaaatcagtaagctggggcagtttccagaccttactttctacatcttcataagaccaattggagcgcatatttcggcaatgcttggcttcattgtccaaggctagcttggcaagaaggggattggcattgctgaggccgatggtagagtagattccagtttcctgccagatccttttttggattctggcagaaaggagatccagtttttcctttcgagagagggagggatctggaataaaataatttaaggaagaggtcagatcgataaaaccttcgtcaatcgagtaagggaaaatatcatctggtgctgcaaattcctgaaagactttttgaatctccatattgacctgaatataggcattcatccgtggaggtacaatcagagtcctcttggcccaggattcaatggatgcaataaaggctggatctgtgggcaatccttgctttttagcgacatagctattaaattttctggttttgaggtcaaaaggtaggtcgtagctacggctaacatttttcttgccaaagacttgtttgaaaacgggagagctcgccaaaatcaggccagcagaattgtcgctccgactcatgacgcaaagagaagtcgtcaagggattgagccccagacggacacattcacaactggcataaaaacttttcatatccacaaaagcaatatcagaatgaggctcacgtgaataatcaaatagcatatttaaacctcgagtggaagaaaatgcccgaccacaatgccgacgattttgggctcgtcttcataaggagcgaataaatcatcatagtcagggttgatggattctaggcgcaagccctcagcttcccgatagactttcttgatgtaagtttttccattccagatgagggcgtagacagccccatcatagtcaaatccggtctgcttcatgagggcaacagagccattggggtagagaggttccatcgaatttccggatacccaagatgcgaagtcatgctggatctctttgtcaaaatagacggtttcatagtctgtttcgttatcataaaaggtatgtcctaaaccagctgccagctcaattgaaagaaccttataagccgtcaaggaaacaactttttgctgctgctctaataactggctggccaattggtcgactttcttttgatgaggtggggttaataaagggtaggtgtagagtgcagactctttgttaataaagtagtcctctttaacggagaggcgcttggccaacctcctgagatttttttcgtgtggctccgccaaaccattctcccaactggagtaagtcttacgagaaatcttgagatcctcgtagacatctgcttgggtcaagcctttttccaggcgtctttcttttagtttttttgcatcaaacatgtcgcttctcctatgtaacgttttaaaagttacatatagtttatcaaaaatgaatcctttttgcaagagaaaaattcagttgaaaacgaatgaaaaggcttggattttgaatgaaaaaggagtataatcagttttacaacttctaacaacgaggaattatatgaaaaaaagttttatacatcaacaaaaagaaatttcgtttgttaaaacgacgtttacacaatatttaaaagataaattggacatcattgaagtccaagggccaattttgagcaaggtcggagacgggatgcaggataacctttctgggattgaacatccggtatctgtcaaggtccttcaaattcctgatgagacttatgaagtcgtgcattcacttgcaaaatggaaacgccataccttggcacgttttggttttggcgaaggagaaggtctctttgtccatatgaaggcccttcgtccagatgaagattcgctagacgctatccactctgtttatgtagaccaatgggactgggaaaaggtcatcccaaatggtcaacgcaacattgcctacctcaaagaaacggttgaaaaaatctacaaggcgattcgtttgacagaactagcagtagaagcgcgctatgacattgagtcagttcttccaaaacaaattaccttcgttcacacagaagagttggtggaacgctatccagatttaactccaaaagagcgtgaaaatgctattgccaaagaattcggagccgttttcttgatcgggattggtggagagcttgcagatggcaaaccacacgatggacgtgcacctgactacgatgactggacaacagagtctgaaaatggctacaagggcttgaatggtgatatcctcgtctggaatgacgttctaggttcagcctttgagctgtcttcaatgggaatccgtgtcgatgaagatacgcttcgccgtcaagttgcgatcacaggggacgaggatcgtctccaattagagtggcacaaggctttgttaaatggtctcttcccactcacgattggtggagggatcggacaatctcgtttggctatgttcttgcttcgtaagaaacatatcggtgaagtccaaactagtgtctggcctcaatctgtccgcgatgaatatgaaaatatcctataaggaagaaagagagtgggacagaaatcggtaattcgttagaattcgatttcgtcgtcccacctccgcacagttgagtagggctgtaaaagctgatgaaatcagcgtagtagagcccactcaaccactgcgtcttactctacaatccaaaaataattgagaggctaggacttttgtcccagcctcttttaattgtcgcttgaccatatcaaatcgcaattttctgattttttttggtataatggtccctatgaaaatagtatctggaacctatgggggacgtcccctcaaaacacttgaaggaaaaacaaccaggccgacttctgataaggtcagaggggccatgttcaatatgattggtccttactttgacggtggaagagtgctggatctctatgctggaagcggtgggctctctattgaagccgtttctcgaggcatgtcagaggctgttctagtagaacgagatcgtagagcgcaggagattgtagcagccaatattgccatgaccaaggaaaaggaacggtttcaactgctaaaaatggaggccaagcaagccttgggtcttctaacgggcacctttgacttggtgttcttggatcctccgtatgccaaggaagagattgttcgcgatatcgaaaccttgtgcgagcgccaactcttgtcagaggacgtcatgattgtgtgcgaaaccgataaacacgtagaacttcctgaggaaatcggacaagtgggaatctggaaagaaaaaatctatggaattagtaaggtaacagtatatgtcagatagaaatggattgtttacaggatcgtttgatccgattaccattgggcatgtgcaattgatcgagcgagctagtcgcttgtttgaccgtgtctatgtcggaattttttataatccggaaaaagtcggactcttttccattgagcaacgcgtgcgcatggtgaaaggggccttggctcatttggaaaatgttgaaattgtgacgtcgactcaagagttggctgtgacagtggcacgcaatcttggggtcatcaccttgatccggggcttgcgcaatgcacaggatctggtatacgaagctaatatggattattttaatcaccagttggcgcctgaattggagactatttatctctatgcccagcctccttaccaggccattagttcaacgcgtattcgagagttgctggcttttcagcaggatatctcaccttatgtaccaaatagtgtaatggaggaaatcaaagatgacacaagcgaataaaccaagcttgcctacaaaaaagaaaaaaggacgattgaaagaataccgatggccgattgcaggcgttctattcttgctcctcttgctctctgcttttgtgattcgccttccctattatattgagatgccaggaacggcagaagatattcgatccgtcatgacagtggatggaaaaatggataccaagtcaggatcctatgactttgtaaccgtagcagtgaaagaagcgaccccggctgatttgatctatgcttgggcgacaccttttacagatatctactctgccaaggatatgacaggtggtagttcgagccaagaatttacgcggattaaccaattctatatggaaacctcgcaaaatatggccatctaccaagggctaaagacagctggaaaagaaacccagatggactttctaggtgtttatgtcatgcaagtagcagatgactcgacctttaagggtatcttgaacattgcggataccgtcaccggtgtgaatggcaagacctttaagagttccaaagaattgattgactatgtcggttctcaaaaaattggcgaccctgtttcagtgacctatattgaggatggacaaacaaagaccgcagacggaaaaatcatcaaattgtccaacgggaaaaacggaatcgggattagcctgatcgaccggactgaagccaaaggcgatgttcctgtgcagtttgcgactcaaggaattggtggaccaagtgccggcatgatgtttagcctagccatctacactcaagtagctgatccagatcttcgtcagggacgccatattgcagggacaggaaccattaaccaagatggaacggttggcgatatcggtgggattgacaagaaagtcgtcgcagccgataaagaaggagcagaaattttctttgcccctaataaccctgtttctaaagaagaaaagaaagccaatcccaaggccaaatcaaactatgaaacagctaaagaagcagcgaaacaaattcattcgaagatgaaaattgtccccgtcaaaacccttcaagacgccattgattatttgaagaagaagtagaagaaatttccgagacaagtaaagtaatgaagctcacatgaaaacaataacatcaagtagatgatcaacggttatcaaatgaaaaggagtggtctttgaaaaaggcatttggtgatgtgaagtaaaagaaaaataggagaaactcatagtgcgaaacaaaaataaggctaggttgattatattcctaattatgcttgttgttggcagtataatttttttcaaatataaaaattcctcagagaaaatttatagaaatgaaactccttcaaaaattagggaaataaaattgttggacaatgataaatttgtttttgtagctgtagagaactattcagacggtgttattttgtttggtcagaattatgttacaactttttcttcgcatacacttgatactactaattttgaaagaactcctccaattgggagtgaagaatattttcaaattaatagttatagtgtacatgataaagaaaaaattgttaaatttaatttatatgaattacttgggaaaaataatttataccgttctgttcataattttccttatagttatttacaaaatgacgatgattacctgacactggatttggagaaactaaatatgtacgatatagtaggtcatgatattagatctgtattagtttctgctagcggagagaaagttaaagatatttctgaaagtgaaatgtagaagattgacaaagaacaacgattatattttagtcaaaaatatgattgggataggggaggaatatctgagcaaattgatgataatctagcaaaatatcatctttcacgatctaaaaattttatataccctatgaatgatgaatcatctaaaattaatgttaatggatctaattttactaaattatttccaaaagtagaaaaaaatataaaatatttaaatagtatttatttccgccctaaacaatacaatgagcgcgaatggtttgataaaatcattcattggtttgcgccagcaggtcaagaagtcatggaactgtatgctacagacgaaacaactggagagaaaacacaaattcactcttatgacgagttcgtagcatggataaaggctcatccgaagaattaatcaccttctaatcaaattcaagtttttgcttatcaatctctctatttttagagggattttttctttatactggtatcagaaagaaagggaggtagtgaaatgattcaaaccagtttgttttccatttcagtattcttagcgggagttctatcctttttctccccatgtattttgccactgatgccagtctatgtagggattctattggattctgaacgtgtgaaaactgttcgaatttttggaagagaaatttcttggtacggtttggtgaagactctttgttttatcgcaggtctatcaactgttttcctgattctaggatacggtgcaggggcccttggccaggtgctttatgctccatggtttcgctatctgctaggagggattgtgatcttattagggattcaccaaatggaagtgatcaatctgagacaactccaaaagcaaaagaccatccaactcaaaaagaatcgggagcgcaatgaatttttcaatgcttttctaataggggtcaccttcagttttggttggaccccttgtgtcggaccagttttgagttctgttctagccattgccgcttctggaggagatggtgctttacaaggcgctctcctgatgctggtctatacattaggcttggcgctacccttcttagtcttggctctggcttctagctgggttctacaacattttgctaaactcaagccccacatgggaaccttgaaaaaaattggtggtgccctcatcatcttgatgggcatcttgctgatgctaggaaatcttaatagcctcgcatccctgtttcactaatcttgaatgattaaaggagaaaaatcatgaaaaaatttcttacactgaccattgctacgcttagcctcgttactttagcagcttgttctggtcaaaaatcggattcagatatgaaaaaaatggacaatagtagcatgatgaagaaggacgatatgaaaaaggatgacatgaaggattcatctatgtccgatgataaaatgaaaaaagaaggcatgaaagattcgtctatgatgtctgacagcagttctgaaatgaaagacgatatgaaaaaagatgagatgaaatccagcgattctagcatgaaggaggatacgagcaactcatcggaaatgaaatcagacaaggaatgaaagaagggagaggtcatctgaggatgactttctccttgtttaaagaggtgataatgatgaaaaaattagctttaatagctacaggattcgtatgcgctggacttttgggggcttgttcgagtcaaggaatggctacttccaataagggcatgagccaacaaacagccaaagctggggctaggcaaccatctggcaagaaagtgaaggagtttagcttgcaaggagtggatggcaagacctaccgcttatctgattacaagggaaagaaagtttacctcaaattttgggcttcctggtgctctatttgcctgtcgacattagaggataccaatgagttggcaaaagaagaggcaggtaaggattacgtggttttatccgttgtagctccaacctttaatggtgaaaaatcagcagcagatttcaaaaattggtaccagtctttggactacaaggatttcccagtcttactggataataaaggagatttgctcaaagaatatgggattcggtcttatccatcggcactctttatcaatagtgatgggactttatcgaagagtcatattggctatatgaataaagaggatatcctcaagaccctagagaacatgcagtaaggagatagacaatggaaacaaaatggaaagtgtttgctatccttctcattggcttattatctattggtttctttttctttagtaagggatcaaatggaatggatcaatcagaaacaagcactgagatgattaaaaaagcatcgatgagtcagactccggtagccaaaaaggaaacaaatgaaacggttgatccaaaagatcagcgcgaaatttatttggctggtggttgcttctggggcgtagaggaatatttctcccgtgttccaggtgtgatcgatgctgtatcaggctacgctaatggaaagggagaaacgaccaagtatgaattggtccctcaaacaggtcatgccgaaacggttcacatcacctacaatgtcaagaaggtatctctgaaagaattgctcctgcattatttccgtattatcgacccaacgtcgaagaatcgtcaaggaaatgatcaagggactcaataccgaacaggtgtctattatgtctctcaagaggaccttccaaccattaaccaagtctttgaagaggtagcaaaaaaatacgacaaaccgttagcagtggaaaaagagccactgaccaatttcatcaaggctgaagactaccaccaggattatctaaagaaacatccaaatgggtactgccatatcgatgtcaatcaggcttcttatcctgttattgatgccagtcgctactccaggccaagcgatgaggagatcaaaaagaagttatctcctgaagagtatgcggtgacacaaaaaaatgataccgaacgggccttctccaatcgttactgggatcagtttgatgccggtatttatgtagatatcgtgactggtgagccgctcttttcctctaaggataaatttgattctggttgtggttggccgagtttcagtcgacctattagtcctgatgtagcaatctataaggaggataagagtttcaatatgactcggacagaagttcgaagccgtgtgggaaattcccatctgggccatgtttttaccgatggtcccaaggaaaaaggcggccttcgctattgcatcaatagtttgtctattaccttcattcccaaagcagaaatgaaagaaaagggctacggttatttattggactatgtctgagacaattcgatctatagtttgctataataagtatagcaaaaacaagtaggtgaaagacatgtatgcgatcatgattgtggaagatgaagagcttatccggcagggtctgacttccttagtagattatgaacagtttggaatgaccgtcattaaccaggctaaaaatgggcgtgaggcttgggagaagtttcaagagcaaccagccgatatccttctaaccgacatcaatatgccacaaatgaatggcttggatctagcccatctcgtcaaagagcagtctccgtcttgtcatatcatttttttgacaggttatgatgactttgagtttgcgaggaaagccatcaagttaggtgcagatgattatttgctgaagcctttttcaaaagatgatattgaagagatgttagcaaaggtgaagggaaaacttgatcaagagcgaaaaaaggcgaaagtcgaagatttggtcagtcatggttattcaacagacttagaagaagccattcatgctcgtttggcagattctcagttaaccctgaaagatttggcctatcaacttggtttcagtccctcttatctaagtgtattgatcaagaaaaaattgggactccccttccaagactacctcattcaagagcgaatgaagagggctcaactcttacttctcacgacagatctaaagatttatgagatcgccgatcaggttggttttgaagatatgaactatttttctcaacgctttaagcaggttgttggggtgacaccaaggcagtacaaaaaaggagagcatgaatgaaacgatatcccttgctgattcagctggtcctctacttttttctcttcattctcctactttttggtcttattggtggcctctattatcaaacgagttcagggacgatccgccagctaacagagcggacgacaagaaatagtatcgatcaaagcagtcagtttatcacctcctatctaaaaaaattaaagcagaccacgacggttcttagcaaggaacaggctgttcgccaatttgctcaagataggagtgcggatcaagaaacggttcaacacctgatgcgaacgatgattgaaacggatccggacctggtctcagcggtcttggtgaccaaggatggacgtctggtagcgacagattccaaaatcagcatgcagacttcctcagatatgatgaatgaaagttggtatcaagaggcgattaaggaaagagccatgccagttttgacgccagctcgaaaggaatccttgacctcggaaaaagaaaaatgggtggtttctattacccaagaagtggtcgatcagactggccaaaatctcggagtagtacgcttggatattggctacgatagccttcaggcttacttggatcaccttcaactagggaaacaaggctttagttttatcattaatcaaaagcatgagtttgtctaccatcctaaaaagtcgctctattcctccagccaagaaatgcaggccatgcagccctatattgctgtgaaagatggttatggcaaaggagggcagaattttatctatcaggttccgattccagatagtgattggaccttgattggagtggcttcacttgaaggacttcagatgcttcagtcgcagcttctttactctttcattggcctaggattactagctttgatcatgtgtttaatagggatcggctttgttctgcgtttgtggatcaaacccttacgagaccttcagactatcattttgaggattggagcaggagatgccaacttgagggctgcagccaaaggatctccagaattggtcgacctcgctcaagcttttaatgccatgttggaccaaatcgataacctcatgcaacaggtcaaggaagaggagcagaacgcacggcggtacgagttgcaggcactttcggctcagattaatccgcatttcctatacaatactttggatacgattgtctggatggcggagtttaataatagtaggcgcgtggttgatatcaccaagtctctggctcaatattttcgactggctctcaaccaaggccaggaaaaaatcttactgagagatgaaatcgaccatgtccgccagtatcttttcattcaaaagcaacgttatggtgaaaagctcaattatgaaattctagaagatgaacggttgggcgattatcagctccccaaattagtgcttcaacccttagtggaaaatgcgatttaccatggcattaaagagatcgatcggccaggtctcattcgagtgacaactgaagtcagtggagactacgcctgcgtatcgatttttgacaatggacaagggcttgaccgatcaggatcaacagatcaaacccttcttcgtttaggaggtgttggcttgaacaatgtggaccaacgattgcatcttcaatttggcgaagcctatcatatggagattgattctaaggccaatagctatacgaaaatcactctttatttgcccctttcatccggcaatgaatattcatagaggctgggacaaaagtcctagcctctcaattatttttggattgtcgagcaagacgcagtggttgagttggctctactacgctgatttcatcagcttttacagccctactcaactgtgcggaggtgggacgacgaaatcgaattctaacgaattaccgctttctgtcccactctctttttgctctcaaatgaatttcaactcttttctagtcaaatctgacgcaagtcatcaaatttatgataaaataaagtgttacagtaaatagattttgatgaaggaacactatgcgaaaagagattgaccctgaattatataattacaataaatttcctggacctgtctttcatcaggtaggagaccaaatccgttcagaaaacctctcctttgagctgttgaaaaatgagaaggaagcttttgatgcgactgtttttggtcagcgattttctgagattttaaccaagtttgattacattgttggtgattggagcaatgagcagttgcgcttgcgtggcttttataaagaagaacgcgatgttgcaacgatggataaattaagtcgcttagacgattatctattggaatattgtagctatggttgtgcttattttgtccttgaaaataaggagcctcatcgtgcttcttttgataagaaatcaccggtcaaaaaagctcaatcagaagaaagagagcccaagaagcgttcgcgcaatcgcaaacaaaaagatcgtttccaaaaacgagaacgcgacaagggacaaccagcgaataactcgaaaaaaacaagatcgtctgctgaaacgaaaaaaacaacgaagacgaacaacaaacgtcattttgtgattcgacaaaaagaggagtaagaaagaatgaaaccatccatttatagtttaacacgccaagatatgattgattgggcggaagaaaacggcgaaaagaaattccgtgcagcacaaatctgggaatggctctatcgcaaacgcgtccagtctttcgaagaaatgaccaacctctctaaggacttgattgcaaagttaaatgatcaattcgtcgtcaacccactcaagcaacgaatcgtgcaagagtcagcagatggaacggtcaagtatctttttgaattgccagacggcatgttgattgaaactgtcttgatgcgtcagcactatggtttatctgtctgtgtaacgactcaggtaggatgcaatatcggttgtaccttctgtgcttctggtttgatcaaaaaacaacgcgatttgaacaatggggaaatcgtgtctcaaatcatgttggtccaaaaatactttgacgaacgtggccaagatgaacgggtcagtcatatcgttgtcatggggatcggagaaccatttgacaactataacaacgtcttgaaatttatccggacggtcaacgatgacaagggattagcgattggtgctcgtcatattaccgtgtcaacttctggtttggctcataaaattcgtgactttgcaaatgaaggtgtgcaggtcaatttggcagtgtctcttcatgcaccaaacaatgacttgcgctctagcattatgaagatcaaccgagctttcccaattgaaaaattgtttgcagcgattgaatactatatcgagactacgaaccgtcgggtgacctttgagtacatcatgttgaatgaagtcaatgatggggtcgagcaagccttagagttggcagaattgctcaagaatatcaagaaattgtcttatgttaacttgattccttacaatcctgtcagtgagcatgaccaatatagtcggagtccaaaagaacgggtcatggccttctatgataccttgaaaaaacaaggtgttaactgtgtagtgcgtcaagagcacggtacagatattgatgctgcctgtggccaattgcgttcaaataccatgaaacgggatcgggagaaagcgattgttcaacatgcgcaaccttaaacaagggctgatcgatcatacagaactaacaaaaagaggaagaagtctgttacggagtggcagcttcttctattttatcctcttgtgcctgatgtgttttttgccccaacagccagagccaggtatggaaacaccgggtattcaacatttcggtcgcatcgtcgtcctgctggttcctcttaattcggtgatgaatcttggccagatcaccagtgtcctccaactcattaaggtcattctccaaaacatagccaatatctttttgttaagcccgctggtctttcaactcctctggctatggccctggttgaggagtcgaaaacgggtcttgtgcttcggctttgcgatgagtttgtggattgaatgcagccaagttctgttagatctcttgtttgatgccaatcgtgtctttgagctagatgatttgtggaccaataccttaggggcttatctggcttatctaggctttcagtatttcagagcacgattgctagcaaaaaatgggaaaatgtaaaatccgaacattccagccactttttaaaatttttgttgacaaagtcagaagcgggagctataatagcttcaagacatcagataagtagggatttttctcacttccagggagcttgtggtgattgcgaacaagcagtggtgaatcttgaaatgggctgatgcgtttatgatgatgaatttgaaacaataaaaattcggtgagcacaccttatcgtgcaccctgttgttagacaggtcagagatgtaggagaaagaatatcttcctacaattgaggtggcaccgcggtatcgaatcgtcctcacacagatttttctgtgtgaggttttttgtatctcaaaggaacccagtgagactgcagctcaaagggcccgcgagagaaaaagatcataaacaggattgaagatagagaaaagaggacacaatcatgacagaaacaaaaggctattttggacaatttggtggatctttcgtaccagaacccattcaaaacttgctcaatcaattagaggaaacctttgaacagtataaaaatgacccagaatttatcgcagaatacaaacattatttgaaagactattctggacgcgaaacaccactctactttgcggaaagtttgacagagcatttaggtggggcaaaaatttatttgaagcgcgaagacttgaatcacctaggttcgcataaattaaataacgtcttggggcaaattctcttggctaaacgcatgggcaaaacgcgcgtgattgctgaaacaggagccggtcaacacggtgtggctacagcagctgcggcagctaagtttggcatggcctgtgatgtctacatgggggcagaagacgtcgaacgccaacgcttgaatgtcttccgcatggaaatgatgggggcaaccgtccatgcggttgaaaccggtactaagaccttgaaagacgccgtggatgccgcgtttggagcatggatggcggatctcgatgccttttacgttttgggttctgctgttggccctcacccttacccaaccattgtgcatgaattccaaaaggtgattagtgaagaatctaaacgtcaaatcttggaaaaagaaggtcgtttgccggattatgtgattgcctgtgtcggtggtggctctaatgccatcggtgccttttctgagtatgtcgcagaagaggaagtcggcttgattggggtagaagctgctggacatggcttggacaccgatcaacacgcagcgaccatgaccaaagggactatcggtgtggttgatggtatgaagacctatgcagtctttggcgaagatggaaaagtagcgccagtttactcgatctctgctggtttggactacccaggggttggcccagagcatgctttctttaaagattctggtcgtgtagaatatgtagcagcgacagatgatgaagcagtagaagctcttcttcttctcagtaagacagaagggatcctcccagccattgaaagctcacacgcgattgcagaagcggttaaacgtgctccacaattagataaagacaagatcatcatcatcaatgtttccggacgtggggacaaggatgtagctgccatcgctgattatctagaagcgaaggctgcaaaataagaagaacttatctgcaaaacattgtataaagcagtaaagcgtgatagctgagaaagagacagggaacaaagggaatccggtctctttcttttttgagagcaaagacgagaatgcctaagatggatgcgatctgaatgagaatgaggatctgggtagaagaaaagcttagcgaaaaggtagctagtaagagaaaatctcctgctcctattccgataaagaaaaagtgagctccgatcgcaaggagtaaaaagaccagcatgaggagattactactggataaaaagaggaccagggcatggagacagcaccagatgaataaagggtattccataaagcgaaggtcataaatggctaaaacggcagctcccagtagtgttagaagttgaggcagagaaaggaaaccattggcgcaggctaaaaagagtaggccactccagacctcaaaaaggcagtaccaaaatgggtaggtctgatgacaatagcgacagcgaaaacgatggagtagttgcgagataatggggatgagatcccaaactccaaggacgtgctgacattgatcacaatgactgcgaggagcgagaatagattggtttgggaaacggtcgacaactagtcccaaaaaagaggcgatacaagtaccgatggtaaaaaaataaaagttgatcatacttatttattcgtaaagcaagcggaaaatttcatcatttgcttgaaaatcttgtaaagcctttctaaatttgatacaataatgaacatgaaaaacctgtatgatgttcaacaatttttaaaacgttttggaatcatcatttacgtagggaagcgcctctatgacatcgaattgatgaaaattgagcttcaacgtctttatgatgcaggcctgatggagcggctcgattatttagaagccgataccgttttaagaagagaacacaagcaagaattagaatttttgaaaaagagtgaggtagagtgatgggaaatatcattgtttggttggttattttaggagcatttggatggatggcgtttaattatttccgcatccgtaaagctgctaaatttgtggacaatgcgacttttgaagagctgattcgtaaaggtcagttgattgacttgcgagagccagctgagtttcatgccaagcatattttaggagcacgcaacattccttctactcagttgaaattgagtcttgcagccttgcgcaaagacaaaccaattttgctctatgagaatagccgtagttcgcgtgtaaccaatgcggctctctatcttaagaaacagggctatacagacatttatgtcttgtcttatggtcttgattcttggaatgggaaagtgaaaaaagacgcctaacctaataaataaagctctaactgcacaaagtgtgtggttagagcttttttatctcgttttttcaaggtagtctttgacccatgtgagctctacctcattcaaaggccggctttctccaggggctaactgaggatccaaggcgaagggaccaaaagacaagcgttttaaggtcattactttgactccaacggccaaaaacatctttttcacttggtggtattttccttctgagatccggacctgggccttgctgtagctggggtggctttctaggatggtcaaggaggccggcttgcagatagggccgtctgtgaatgaaatcccattctgaaattgctcgatgtgggctgcatagagcggaccattgacttctacctcatagaccttctccacatggtattgaggatggagcagttgaaatcctaagggaccattatctgtgatgaggagcaaaccactcgtatcgcgatcgaggcgaccaagcggatagaggtctgggtactcttgttgagggtccactagatcgatcaccgttggatggtgggcgtctcttttggcggtcacggccccgattggtttatggagcatgtagtagtggtgacgcggttcttgaataattcgttcccctatttgaatctgttggagtccagggtcgatgttttgggatagcttttgagctggtaggtgatcgaccaagatttgccttcgggctagaagttgtttgatgtctttgcgagcgtactgatggtctgccatcaattgatctaatctcatgggagcccctttttctgaaattcttatcatcagtgtatcatgaaaagaaaaggaaatcgagtcggagaaaagaaatgaagatgaaaacatttacaactagctgaactgtgttttttagataggactgtggtataattgttcagttagaaatattatttaaaattttatagaggaaatcatgacaaaattaagagaagatattcgtaacgttgcgatcattgcccacgttgaccatggtaaaacaaccttggtagacgaattgttgaaacaatcgcacaccttggatgaacgtaaagaattgcaagaacgtgcaatggactcaaacgatcttgaaaaagaacgtgggatcacgatccttgctaaaaatacagccgttgcttataacggaactcgaatcaatatcatggacacaccaggacacgcggacttcggtggagaagtggaacggatcatgaaaatggtggatggggttgtattggtcgttgatgcctacgaaggaaccatgcctcagacgcgtttcgtattgaaaaaagccttggaacaagatcttgttccgatcgttgtagtcaataaaatcgacaaaccatctgctcgtccagaagaagttgtagatgaagttcttgaactgttcatcgaattgggtgcggatgacgaccaattggaattcccagttgtttatgcatcagcgatcaacggaacctcttcgctttcagatgatccagctgatcaagagcacacaatggcaccgatctttgataccatcattgatcacatcccagccccagttgataactcagatgagcctcttcaattccaagtatccctgcttgattacaacgacttcgttggacgtatcggtatcggacgtgtcttccgtggtactgtaaaagttggggaccaagtaacactttctaaattggatggaacgactaagaacttccgtgttaccaaactctttggtttctttggtttggaacgtcgtgaaattcaagaagctaaagcgggtgacttgatcgcgatctctggtatggaagatatcttcgttggagaaacgatcacaccgacagacgcagttgaagctcttccaattcttcacatcgatgaaccaacgcttcaaatgaccttcttggttaacaactcaccatttgctggtcgcgaaggaaaatgggtaacctctcgtaaagttgaagaacgcttgcaagcggaattgcaaacagacgtctctcttcgtgttgacccaactgattcacctgataaatggacagtttcaggacgtggggaattgcacttgtctatcttgatcgaaaccatgcgtcgtgaaggatacgaattgcaagtatctcgtccagaagtcatcatcaaggaaattgatggtgtcaaatgtgaaccatttgagcgcgtgcaaatcgacacaccagaagaataccaaggatctgttatccaaagcctttctgaacgtaaaggtgaaatgttggatatgatctcaactggtaacggtcaaactcgtttggtcttccttgttccggcgcgtggtttgattggatactcaacagagttcttgtcaatgacacgtggttacggaatcatgaaccacacctttgatcaatacttaccagtaattccaggagaaatcggtggacgtcaccgtggtgctcttgtttcaatcgataacggaaaagcaaccacttactctattatgtctatcgaagaacgtggtacgatctttgtcaatccaggtacagaagtttacgaaggaatgatcatcggggaaaactctcgtgagaacgacttgaccgtaaacattacgaaagcaaaacaaatgaccaacgttcgttcagctaccaaggaccaaacagcggtcatcaagactcctcgtatcttgaccttggaagaatctcttgagttcttgaacgacgatgagtacatggaagtaacacctgaatccatccgtttgcgtaaacaaatcttgaacaaagcagaacgcgaaaaagcaaataaaaagaaaaaatcagcagctgctgaataatactgaaagaaaggagaaacaaaatggtctattttatcttagggattttgattctccttttttatctttttatgacaccaaaaagcatccgtggcacgttagatagtgtagtattggttattttgatcgtctcgattatcgttctcacttgccttgctatttttcaaatttttcaattaccatctgaattttttgttggcgcttttctagcctctattggttatctagctttagtggatatttcaaaaatgacaaccaaacagaaaaataaacgatgacgtgatttttaaagccctttgggctttttaattttgctaaaaaaaggtaaaatagagagtgataaaaatggagcgaagaaatcatgaaatttgtgaaacaatttgaaaataaaaaggttcttgtattaggtttggctaagtcaggcgagtcagctgcccgtttgttggatcgcttaggagcgattgtgaccgtcaatgatggcaaaccttttgaagaaaatccagcagcacaaagtttactggaagaagggattaaagttgtgacaggaggccaccctctggagttgttggatgaagactttgcggtcatggtcaaaaatccaggaatcccttatacgaatccgatggtcgaaaaagcgcttgaaaaaggcattccagtcctcactgaagtagaattggcttatctgatttcggatgcgccaattattgggattacaggatcaaacggaaaaacgacgacgacaaccatgatcggggaagtcttgacggctgctggtcaaggtggtctattgtctgggaatattggttttccagccagtcaagtcgcacaaacagcgacagaaaaggaagttctggtcatggaattatcttctttccaattgatgggaattgaagccttccatccagagattgcagtgattaccaacctcatgccaacccatatcgattatcatggttcttttgaaaattatgtagctgctaaatggaatcttcaaaagaatatgacagaaaaagatgtcattgtattgaacttcaatcaagacttggctaaggaactcgctacaaaaaccaaggcaagggtccttccattttctacaatcgaaaaggtggacggtgcttatttggaagatggacttctcaagtttaagggagaagttgttatgcgagcagatgaactgggggttccaggaagccacaatgtagaaaatgccttagcaacgattgctgttgcaaaagtccggggtgtggagaatgaggtcattaaagaaaccttgtcagcctttgggggtgtaaaacaccgccttcaatatgtggatgaaattcaaggtgtcaaattctataatgatagtaaatcgaccaatattttagcaacacaaaaagctctttctggttttgataacaacaaggtgatcttgattgcaggggggctcgatcgtggcaatgaatttgatgaattggtgcctcatattacaggtctaaaggagatggtgattctaggggaatcggctcctcgagtgaaacgcgcagccgataaagcaggcgtcccttatgtcgatgcagcagatgtagcagatgctacaaagaaagccttcgacttggctagccctggcgatgttgtgctactaagtcctgccaatgctagctgggatatgtatccgaattttgaagtgcgtggggatgaatttcttgctactgtaaaagggttgaaataagatgaaaaaaataatgtttactggtgggggaaccgtgggacatgtgacccttaatctcctcttgattccaaaatttatcgaagatggatgggaagtccattatattggggacaaaaaaggaatcgaataccaagagatcaaaaagtctggattagaggtacgattccattcaattgcaacggggaaattgcgtcgctatttctctttccaaaatatgatggatgttttcaaggtagcttggggaacgcttcaatccatagcaatcctacttcgtgtgcgtccacaagttctcttctcaaaaggtggatttgtatcggtgccaccggtgatcgcagcccgtctcactcgtgtacctgtctatatccatgagtctgatctttctatgggattggccaataaaattgcttataaatttgctaccaagatgtacacgaccttcgagcaagctcatggtttgacaaagagtgcgcatatcggtgcggtgaccaaggtcacagatcctatttctccaacttcagaagttttagaagaaaaaacaaaaggattccgaaaagagttgccgaaccttttatttgtcggaggatcagcaggtgcgcgtgtctttaatgaatttgtgacagagcatcaagcagagctcttgcaacaatacaatatcatcaatttgacaggcgattcaacattgaatcaggctgagggtggcttgtatcgagtagattatgtaaccgatcagtatttgcccatgctccagaaggccgatttagtggtgactagaggtggggccaataccttgtttgaactcttggccatgaataaactccacctgattgtaccgctaggaaaagaagccagccgtggcgatcagattgaaaatgcccagtattttgtggataaaggttatgcagagcaattgcaggaagatcaattgacgctcgaaacctttaatgaaaccattcaagaaatgttgaagcaaagccaagtctaccaccaagcaatggaaaaatcgacggaactcctttcactagccgatttttatggcctgcttcaaaaagatatcagtaagggaaaagatgacggacgacaataaaaaaacaccaacggatgacaaaattacagaattgtcagcctggcaaaaaagaaataaagaatatttagaaaaaaaagccttagaaaaaacggaagagtctaaagctgtggaaactgaaagagaagtagcaaaagaaaacgaagatctttcagaaaaagaaatagcttctgtctcagaggaagaaactgacgaaataaaggagtctgaagaggaaaataaatctgaagtcgaagaggatccagaaacggatggggaaggttcagatggagaaaagtacgatccagctatagaggagctagatcgtttagagaagcaagtgaaaaagccttcattttttgaacgcttgaagacgaaaaaatcgaagaaggaaccggcagtggcaaaacgtcatatctatcgtgcccttcctgttttagggattagctcgttggttgcacttctttctctttatttcttaagtcctttatcgacacaaaaagtgattgaattttctggaaacaaagtggttgatcagcaacaattgtataaaaaaagccagatcaaagaagaagattatactctgacgacctttattcatatgtcgatttatgaacagaatatgaaagcagctagcccgtggatcaaagaaatacatatgaattatcactttccagtgacctttaaggtcaatgtgacagaacataaagtggttgcttattatgttacgggagaagatcactacccagtattagaaaacggtgaggtggttgaaatagtcactccaacgtctgaattaccgtcttcttatattagtttgaagttttcagatcgggaattgattagacaatttgtaaaagaaatgtcgtccatttcctcttcaatcaccaatggtattgtttctgttgatttgacacctagtaaggtgacgaaggatctggtgactattaccatgaaaaatgaaaataaaattctgattcctatttcgcaaattaaccgaaaactttcttactacaaggctatcagtaaacaattggatgatgcttcaactattgatatggaagcaggaattttcagctatagcgaacaatcgatcgcggatgcgaaagagcaggctgaaaaagagaaggccgaaaaggagaaagctgaagtttccgaaaaccaaggagaacattctgaggaatcaacgcaagagtcaaatacagaggaacggaatccttcaggaaatgactaaagcccataaattatctcaaataattaaagaaaaaatgtccattatatgcttctttgtgatataatgaagtttggatagttctaaccaaaagggctataaatagatgtaaagtgaaaacaaataaagagagaggactggtgtaatggctagagacggcttttttacaggtttagatatcggtactagttcaataaaagtattggtggcagaacatgtcaacggagaaatgaatgtaattggagtcagcaatgcaaaaagtgctggcgtcaaagatggaattatagtagatatcgaagctgcttcaactgcaattaaaaatgcaatcagccaagctgaagaaaaagcagggatttcaatcaatctagtcaatgttgggttgcctgcaaacttactacaaatcgaagcaactcaaggaatgattccagtcacaagcgattcgaaagaaatcacagatgcagatgttgaaaatgttgtcaaatctgcactcacaaaaagtatgacaccggatcgtgaagtaatcaccttcattcctgaagaattcacagtagatggtttccaagggattcgcgatccacgtggaatgatgggaatccgacttgaaatgcgtggacttctttatacagggccacgtaccattttgcacaatttgcgtaaaacagttgaacgtgcaggcttacaagttgaaaacatcattatttcaccacttgctatgatcaaaacagtcttgaacgaaggtgaacgtgaattcggagcaacagtgattgatctgggtggtggccaaacaacagtagcatctgttcgtagccaagaacttcaatttacaaatatttaccaagaaggtggcgattacgttaccaaagatatttctaaggtattgaagacttctcaaaaattggcggaaggcttgaagttcaactacggtgaagcctatgttccatctgctggaaacgaagtattccatgtagaagtcattggtgaagtagagccagttgaagttacagaaaagtacttagctgaaatcatttcggcacgtatcaaacacatttttgagcaaatcaaacaagacctcgagagaagacatttattggatcttcctggaggtattgtgattatcggtggaggtgcgatccttcctggtgttgaagaattggctcaagaagtctttggtgtaaatgtaaaattatttgttccaaatcaaattggaattcgcaatccagcctttgcccacgtgattagtttgtctgaatatgcaggcaatttgacagatgtggacattcttgctcaggctgctgtgcatggagaccaacgtcttcgccagcaaccaattcaatttgatcgaccagctcaacctcaagcacaaccgcaacctgctattccagcacaaccggtagtaccagcttacaatgctgaaaagatcgaatctccagtagctgcaccagaaattcctgcagcgaatagtgatagcaatcaagaacaaaaagctacattcacagaccgaatgaaaaatttaatcggtaatatgtttgattaaggagtgtaagtatttatgacattttcatttgacacagcagcggcacaaggtgcagtaattaaagtaatcggtgtcggtggcggtggcggtaacgccatcaatcgtatgattgacgaaggcgttgccggtgtagaattcatcgcagctaatacagatgttcaagcactttcaagtgcaaaagctgaaacagttatccaattgggtccaaaattgactcgtggattgggtgctggaggtcaacctgaagttggtcgtaaggcggctgaagaaagcgaagaagtgttaacagaggctttgcaaggtgcagacatggtcttcattactgcagggatgggtggaggatctggtacaggtgctgcaccagtcatcgctcgtattgccaaagctgtaggtgctttgacagtagcagtagttactcgtccattcgggtttgaaggttcaaaacgtggcaacttcgctattgaagggatcaatgaacttcgcgaacatgttgacacattgttgattatttctaataacaacttacttgaaattgtggacaagaagacaccgcttcttgaagctttgagtgaagcagacaacgttcttcgtcaaggtgttcaagggatcactgacttgatcacaagtcctggattgatcaaccttgactttgcagacgtgaagaccgttatggaaaacaaaggaaatgccctcatgggtattggtgttggtagcggtgaagaacgcgttatcgaagcggctcgtaaagcaatttactctccacttcttgaaaccacaatcgatggtgcagaagacgtgatcgtcaacgtaacaggtggtttggatatgactttgatcgaagctgaagaagcttcagaaattgtgaaccaagctgcaggtcacggagtgaacatctggttgggtacatctatcgatgaaacccttaaagatgaaatccgcgtgacggttgttgcaactggtgtccgtcaagacaaggtagaacgcgtcagcggaattgcttcctcacaacgtccttataaaacaggaccacgggaacaacgcccacaagttgcaccatttgaccgtgaatttgatttgaaacaagatgttgaattgccaacaactccaagtcgtccagcggtagaaccaaaccgtggctcagcttttggtgattgggatatccgtcgtgagaatatcgttcgccaaactgaaacaacatcaactcatcaagttgatcgttacgtagattcatcttcagatgatgatgaattggaaacaccaccattcttccggaatcgttaatcatgaatctgatagagaatgctgatcttgttcggcaacaagtagaaattgcaagaaacaaagctaaccgtcaagatcaagtcaatgtgatagctgtcaccaagtatgtggatgttgccacaacagaagcactggtgaaaacagggattcagcatatcggtgaaaatcgtgtcgataaattcctagaaaagtatcaagctctaaaagagtatgatcttacttggcacttgattgggagtctccaacggaggaaagtaaaagatgtaatcaatttcgtcgattactttcatgccttggattcggtgaagctggctcaagaaattcaaaaacgagcagaacacccgatcaagtgtttcctccaagtgaacatttctggtgaagaaagtaagcatggatttgcacccgatgaactggatgatgttttagcggaaattgcacagctggacaaaattgaaattgttggtttaatgacgatggctccttttgaggctagtcaagaagagttgcaggatattttttcaaaaactcaccaacttcagaaacaactagaaaagaaacaattaaaaaatatgcctttttcggaactaagtatgggtatgagtcgtgactttgaagtagccattgcgaacggagcgacttatgtaagaattgggacatcattttttaaataggaaagaactatgtcattaaaagataaatttaacaactttattgactacttcacagaagacggtgaagaagtagaagttcgcgaggcaaaagcagctggggcggaaacacaaccagttccacagccacagccgactcctcaagtgacttctccacgtccacagattagtcaaagagaaccagtaaaaccaaaaccgactcctgtcgcacctgttacgactccagtgtctacagcggcagtgaaggaacctgtttcaactacgaaaaatacatctgaaaatattactcgcttgcatgaacgtcaacgtgaattggctgctaatcgtgcgaatacagatgaaaagattaccattgatgtgcgctatccccgcaaatacgaggaagcgactgaaattgttgatctattactatctaatgagagtatcttgattgacttccaatatatgacagaagtacaagcacgtcgttgtctagattatttggatggggctcgttatgttttagcaggaaatcttcgtcgtgttgcaagtacgatgtacttgttgactccaattaatgtagtcgttaacattgaagatatccgccttccaaatgatgtggaagtgacagaatttgactatgatatgaaacgtaatcgttaagatgattatccttcaatatctatccaatatctatccaatatcattcaaatctattccattattcttgtcatctatgccttactttcttggttccctggggcacctcagagtactcttggacaaatggttcaccgcctagttgaaccatttttgagcctttttagaaagttacccttgcagtttggaggctttgattttacagttcttgtagcgctactggttttgaatgtattaaaccagttgttggggcaactatttctacaattgattggttagtatacgatgggacagaaagagatttaccaacatttcaatcgtgaagatcacgaatttattgatcgttgtattgaattgtctgaaagagtgatggaacgctattctgttgaggtgacgggttttttaaaccctcatcaggtcactattttacgaaatgttgcggcaagctatcagttacaggtattttcttctagtgatgagcagaatatggagtatgcaaaggttattgttgctccggattattatcaattggatccaaatgactttgatctggccttattggaaatggtctatgcttcaaaatttcatcacttgagtcattcccaggtactgggtaccattgttcaccaattaggggtggagcgcaagtcctttggggatattctgacgagtgaaggaaagatccaagtatttgttgaacagcgttttgttcactattttatggatcacatccagaaaatttctcgggtacctgttaggcttagggaagttcctctatcagaacaaatgatcgtagaggaagaaagccagcaacgagatattctcgtgtcgagttttcggctagacaaggtgattgctgggaccttcaagctttcgcgttcacaggctagtcagttgattagttctggtttggtgaaagttaactatgcgacaacttccaatgttagctatgctgtaggtctgaatgatttagtcagtgtccgacgctttgggcgtcttaaaattgtttctgaaaatggtatttcaaagagtggaaaatacaaattaactgttgaagtactcttaagtaaaaaatgaggaggagttatggctcttactgctttagaaattaaagataaaacttttggcgttaaatttagagggtatgatgcgaacgaagtagaagaattccttgatatcgttgtgcgtgattatgaggatcttgttcgtttgaatcatgatcaagaaacaaaaattcatgcccttgaagaacggttgaactattttgatgaaatgaaagattcattgagtcagtcagttttgattgcgcaagatactgctgaacgtgtgaagcaagctgctaatgagcgttcagaaaatattgttcgtcaagcagagcaagatgcacaacatttagttgatgaggctaaacaaaaagcaaatgaaattcttcgtcacgcaacggataatgccaagaaagttgcagttgaaacggaagaattgaaaaacaagacacgtgtcttccatcaacgtttgaaatcaacaatcgaaagccaattgagcattatcgatacgcctgaatgggatgaaattcttcgtccaactgctatgtatattcagacaagtgatgaagctttccgtgaaattgttgaaaaagctttgggtgaatcagtgcaccatcatccagaaaatgagaatatcgatttgactcgtcaattctctccagctgaaatcgaagaattgcaaaaacgcatcgaagcagctaatttagaattgggtgcaacacaagcgtttgaaggtttgaatgaaaaagttcaatccgctttagaagaagcagagcacgctcgtcatgaaaatgaggcggttgttgaggagccggttcaaccagaagacgaaacgaatcgtgaatctgtcaatattttataattttgtaaaaacaggtccattaatgataggtctagcgagcagatgatggtggaaggtctgcactccctcttaatggatgatccttttacagtattcgttctgaacccttgagtaagaacggacgtttccctcgttacgggatgagaggagaaagtcgcttgcgacttctcgaacaaaggtggtaccacgagcaatcgtcctttttaggatgctcgtgtttttttatagtttttaaatcaataaggagacacaatgaaactcaaagaaacattgaatcttggaaaaacagcttttccaatgcgggctgggcttccaacgaaagaacctgtttggcaaaaagaatgggaagatgcaaaattgtatcaacgccgtcaagagttgaatgaagggaaaccgcattttacacttcatgatggccctccctatgccaacggaaatattcacgtgggacatgccatgaacaagatctcaaaagatatcattgttcgttccaaatctatgtcaggattttacgccccttatatcccaggttgggatacccatggtttgccaattgagcaagtattggctaaacaaggtgtgaaacgcaaagaaatggacttggttgagtatttgaaactctgccgtgaatacgctctttctcaagtagataaacaacgcgaagacttcaaacgcttgggtgtttcaggtgattgggagcatccttatgtgaccttaacgcctgactatgaagcggcgcaaatccgcgtctttggcgaaatggccaataaaggttatatctaccgtggggctaagccagtttactggtcttggtcttctgaatcagctcttgctgaagcagagattgaataccatgatttggtatcaacgtctctttactatgctaacaaagttaaagatggtaagggtgtcctagatgcagatacctacatcgttgtctggacaacaactccatttactgttacagcttctcgtggattgacggtaggtgcagagtttgattatgtcgtagtgaagcctgctggatctgaccgcaagtacgtcgtagcctctgaactcttgccaagcctttctgaaaaatttggttgggaaaatgctgaagttcttgcgacttaccaagggaaagaattgaaccatatcgttacagaacacccatgggatcctgaagttgatgaattggtgatccttggtgagcatgtaacccttgattcaggtactggtatcgtccataccgctcctggttttggtgaggatgactacaatgtagggattgccaatggcctcgaagttgctgttactgttaacgaacgtggaatcatgatggagaatgctggacctgactttgcgggtcagttctatgacaaggttgttccaactgtcatcgaaaaacttggtgatttgctccttgctcaagaagaaatctctcactcctacccatttgactggcggacgaaaaaaccaatcatctggcgtgcagttccacaatggttcgcttctgtatcaaaattccgtcaagatatcttggacgaaattgaaaaagtgaaattccactcagaatgggggaaagtgcgtctttacaatatgattcgtgaccgtggtgactgggtgatctctcgtcaacgtgcctggggtgtgcctcttccaatcttctatgcagaagatggaacaccaatcatgacggctgaaaccatcgaacatgtagcgcaactctttgaagaacatggttcgatcatctggtggcagcgtgaagcgaaagacctcttgccagaaggatttacgcatccaggttcaccaaatggcgaatttacaaaagaaacagatatcatggacgtctggtttgactcaggttcatcatggaatggggttgttgttaaccgtcctgagttgacttatccagcggatctctacctagaaggttcagaccaataccgtggttggttcaactcatctcttatcacttctgtggcgaaccatggtgtcgcaccatacaaacaaatcttgtctcaaggtttcgctttggatgggaaaggtgagaagatgtctaaatctcttggaaataccattgctccaagtgatgttgaaaagcaatttggtgccgaaatcttgcgtctctgggtaaccagtgtagattcaagcaatgacgtgcgtatctcaatggatatcttgagccaagtgtctgagacttaccgtaagattcggaatactcttcgtttcttgattgccaatacttcagactttaacccagctgaggatgcagttgcttatgatgagcttcgttcagtggacaagtacatgacgattcgctttaaccagcttgtcaagaccatccgtgacgcttatgaaaactttgagttcttgacgatctacaaggcgctagtgaactttatcaacgttgatttgtcagccttctacctggattttgccaaggatgttgtttacatcgaaggagctaaatcacttgaacgccgtcaaatgcaaacagtcttctatgatatccttgtgaaaatcacgaaactcttgacgccaattcttcctcacactgctgaagaaatctggtcctatcttgagtttgaagcagaagacttcgttcaattgtcagaattgccagaagcagaaacgtttgccaaccaagaagaaattttggatacctggtcagccttcatggacttccgtggtcaagctcaaaaggccttggaagaagcgcggaatgaaaaagtgattggtaaatcacttgaagctcatttgactgtttatccaaatgaagttgtgaaaacacttcttggagctgttgatagcaatgttgctcaactcttgattgtttccgagttgaccatcgaagaaggaccagctccagaaggtgcagtgacttttgaagatgtagccttcacggttgaacgtgcagctggtgaagtttgtgaccgttgccgtcgcatcgatccaacaactactgaacgtcactaccacgcaaccatctgtgataactgtgcaagcatcgtcgaagagaactttgcggacgcagtcgcagaaggatttgaagctaaataaaagccattaagagagtgggacagaaatcggtaatttgttagaattcgatttcgtcgtcccacctccgcacagttgagtagggttgtaaaagctgatgaaatcagcgtagtagagcccactcaaccactgcgtcttgctcgacaatccaaaaataattgagaggctaggacttttgtcccagcctctttttaatggctagaatggtgtatagattcatgtatcaaggaaataaaaaaagtaaggcaaattggccttactttgtaattggaaaggaaatttcaattagtttatcggagtagagggttttaatagcggattggtcaataatttgaagatcaatcttacgttttaaaaagaactcacgaattttttctacttcagtttcacgaatagctcggtgtttgttgctgatcaacaattcatagtgtgttggggcttgtgtaaaaacaacgtctgtattgcccgcggaataaacctcaacaagcaaggcgtcagtgctggcaagttggcttttgaccagtgcagcatgactatttgtggtattaatgagcttcatatgagttcctcctaacctctatcttcatttattatagcacttttttattttttgtgaaagaattcctttatcttttgtgggtatttttccactgttcaatgccccatttatgactgccacgtttgagtttttcaatagcttcttctacaggaaaccaagcaagattgttaaaatcttccagtggtttttgagcttctgtatagcctaccacttcataaatataggcgggattgtagtagtaggtgtcgcgatgactggaatagaaatactcatctgcttggccatagtattgccctaaaatagcagtaaagcctaattcttcgatcagttcccgtttcagagcttgcaagtgatcttcacctgcctcgatttccccacctggtaagaaccaggctccattaggagcttgaacgaggatgatctgatccttgtccttattgggaataacagcgtagacaccatagcgattgacgtaggtcacatcttgttttttttctccaaatgtaggatttgtcattgaattttcctcattatctagtatctttattattatcataatggacgaggtgaaagctgtcaagaataaactgccgaacttgtgtaaaagtagctactttgtctgaagtataaatttgtttagttaaacactcctatcaaattagtttaattgatataataaaagggaggtgattttatggctgaatcaagactatttcgtattttatacatacttttagaaaatgggagaataaccgctcctgaacttgctcgattatttgaagtctcagtacgtacaatttatcgtgatattgagagattaagcatagcaggtattcctctttattctgttcctggaaaggctggagggacctttttaatggaagacttcgttcttgatcgcacccttgtatcagaggaggaaaaaataaaacttttatctgctttacaaggtctccagactttgacagaagataaacaagattttttactgacaaaattggaatctatttttaaagtttcagctaaatcttggttagaagtcgacttaacagattggaggaaacgaaaagggcaaaaaaatctctttgatacaattaaacaagctatcttagataaaagacgactttcgattacttatctgagtggaaatggtcagataacgattcgtacagttgagccttttaaactagtatttaaaaaaagagactggtatcttcatgcttattgttgttcaaaagaagattggcgtttttttaaattatctaggattaatgactatcaactactggaagaaacaattaaccaaaaaaatgtgattgaacctattgatacttcaattaagatggaaaatctaatggaagtatcattgaagtttagtcaaaagctcgcttttagagtttatgaagactttttagaagaagagatttttcagtgtgaggatggatgtttatatgttaaaacccaattgccagagcacgagagtatttatacttacttattgtcttatttagatggggtagagattattgaaccggatcatctgagaagatcaatgatttcaagattagaaaaaatacaaaagatttataaaccttgacaaaagatgtcagggttttaatgctagaattgagatagaaaggagataggtcaaatgaaatatgaatggagaaaaatagagaaagttctctatcaaatcaaggataagcccactatcctgcaagtaccttctaaatcctatatcataattgacggcaaaggggatccaaatgaagaagatttttctcaacgagtgagtgccttatatgcgttagcatatgctataaagatgaagtataaaaagtctcctctggatcaagactacatggattttactgtttttccattagaaggtttatggaaacaggagaatgaagggaaactagttaaaagtgaactgtcttatagtattatgattggtcaacctaattttgttacgagtgacttgtttgataaagctttggaagaggttaaaatcaagaaacccaatcagctctatgatgctattcgttttgaagaactagaagaaggctacagtcttgccatgcttcatgtaggaccttttgatacagaaaatcagacttttgatgaaatggagcgtttttgcaaactccataaacttaaaagaatttcgaaagttcatcgtgagatttatctaaacaatctccatcgaacagatccatataaattaaaaacaattcttcgttatcagattcaagaagagaattaaaaagaacaggaaataagaattcctgttctttttataaaactagaaaatttagtcttccttttcagaagtgttcttttctacttttttagcagctttgatactaatattcccattgctggtcatgactgctttgagttgtttttcacttggatgttctaggtaataatcggtaatagcatcttcgatatggtcttggatggtacgacggagtgggcgggcccccatttttggatcgtatcccagatcgaccaatttttctttgaccttctctgtcacatccagatgaatctcattttgtgcgagacgttgattgacttcatcgagcatgagggtaacgatttgaagaaggttttcttttgatagaggttggaattcaatgatgccatcaaaacggttcatgaattcagggctaaagaagttaccgagttctccaagtacagagttggttcgaccttcgcgagcagctccaaaaccaacattggcctcagctttgccggttccagcattagaggtcatgatgataatggtatctttaaagctgacggtacggccttgaccatctgtcaaacggccatcatccaagacttgcaagaacatgtgcatgacgtctggatgggctttttccacttcatccaacaacacgagggagtaaggattgcgacggactttttcagttagttgtccagcttcatcgtagccaacatagcccggaggagctccgactagtttcgctacgctatgtttttccatgtattcgctcatatcaaagcggatcatattatctgcagagccaaagagctcgatcgccaattgtttagacagttcggtcttcccgacaccggttggtccgacaaagaggaagcttccgatcggacggttaggtgatcctaggccgacacgattgcgtcgaatggcttttgcaattttatctactgcatcatcttgaccgatcacatgagctttcaaatcagaagccagattgatcaattgagattgttctttttctttcaaatcaccaacaggaatattggtcttttgttcaacgatgtgttcaatagttttttcactgatgacaggggtctcctgatcagtgacatgttgaccttgcatttccttgtatttcgcgatttggtcacggaagtaggctgctttttcaaagtcttcttcgcgggttgcttgagctttgaggttttccgcttcaatcaagcgctggtcgatcacttttggatccacaaagtttagggtcaggttcatcttagaccccgcttcatccaacaaatcaatggccttgtctggcaggaagcgatcttggatgtagcggtttgacagaatagctgccgcttcgatggccccgtctgtatagtggacgtggtggtagtcttcgtattttttctggatgcccttgaggatggtgatggtttcttcaaccgttggttcatcgaccttaacgggctgcatccgacgttccaaggccgcatctttttcaatgatacggtattcattgagggtagtagccccgactaattggagttctcctcgcgctaaggctggtttgaggatatttccagcgtccatattgccctcaccagctgatcctgcgccaacaatttcatggatttcgtcgatgaacagaataacatcttcgcgttgacgaatttcatccattaatttttgcatgcgttcttcgaattgaccacggatgcctgtgccctgaacgaggctcacgacgtctaggcggatgacttcttttccttgcaatttatgtggaacgtcgccatcaacgattttttgagccaggccttccacaacggcagtctttccgacaccaggttctccgatcagaaccggattgttcttggttcgacggttgagaatttcgatgacacggataatctcttcgtcacggccaatgacagggtcaatatcccctttgcgggcaatttctgtgacattgatgccgaactcttctaacagcccttttggcttttgagggcgtgcttgacgagggtcttgaccaccaccacggttattgttttggccgtagccgccacctccataactgcctccggattgagttggaggggtttgaggttcttgcggactttggaagtttccaaggttattgaagaaatcttcaaaaggatctccagtgagttggctccgttgggtcatgcccttcaagaagctgttatttgggtctgttttcataattttatagcaattttgacagaggtctacttgctgctgacgtccatttacatttgtatataaatggatggttgattcatttattttacaattttgacaaagcatatacatacctcacagtaggtttttgatggttttccatcaagagacgagcctattttcaaaaggtcaaaaatagtcaaagatttatagtttcattatatcagtattctagaagtttgcaagaatttgctacggaatgtcgctaaggagtgaagaagagagtaaatcaatggaaaaatgtgaatttttattggaagagctttctcttttatgataaaataggagagtagaaagtaaagaggagaaataaaatggaatcacatttagtacggattattaaccgtttggagacgatgacaaaagacggtggaaacttgaaacgtaattttgaacgtgacggtgttgttgtcgctgaagtagcctacaaccacaatgaagaagaaggttcaacctttacacttcgtgatgttgaagcgcgtgaaacctatacatttgatagcattgatttaattgcaatggaaatttatgaattgctttactaagcagctgtgtggatgagtttggggtggtctcaagctcattttttgtccatctggctatagttttcgtctataagaaattctaattaggaacagttaggtttgagagttgaaatctgctataatagagaggactattttcattacttgactagaaagagaattgacatgacgacaatcattgatgggaaggcgctcgctacaaaattacagggtgagattgcgaagaaaacagcacgattaaaagaagagacaggagttgtgcctggcctcgttgtcatcgtggtaggagataatccagctagcaaaatctatgtaagaaataaagagcgttctgctattgcggcaggctttcggagtgaagtgagacgacttcctgaaagcatcagccaagctgaattattagaagtgatcgaacactacaatcaagatcccctttggcatgggattttagtgcagttgccactgcctaagcatatcgatgcggatgcagtccttttagccattgatccgacaaaagatgtggatggctttcatccattgaatatgggacgtttgtgggctggaaatcccctcatggtgccttcaactcccgctgggatcatggagatgttcaaagagtacgggattgatctagaagggaagcgagcagtcgtaattggtcgttccaatattgttggaaaaccaatggcgcagttgctccttgctaaaaatgcgacagtaaccttgacccattcccggacccatcatctgcctaaaattgctagaagagcagatatcttggttgttgcgatcggtcgtgcgaaatttgtaacagcagacttcgtgaaagaaggcgccgtcgttattgacgtcggaatgaatcgcgatgagaatggcaaattgtgtggggatgtcgattttgactctgttgcacctttggccagtcatattaccccggtaccaggaggggttggtcctatgaccgtcaccatgctgatggagcagacctacgaagcagctgttcgtgccttaaaaaaatgaaagtgtgaacaagatgaagtttgtatttgatttagatggaaccctgtcattcgatggtgtcacaatcgatgatgaaatcaaacaggtcttattgagagcagaagaatttggccatgaagttgcctttgcttctgcacgttcttaccgggactgcttgggtcttttaggggatccattgagtcagcaactcgtgattggtttaaatggtggattggcctatcgtcaggggcaattggtatatgaggaacaattggacaaggatgtgtatcgggaagtccttggcttttgccgccattacaatctaccattttttgtggatgatacctttgattatagcggacagattttggaaaagattccttttgttgctaatgtagatcccctcaagaaagcccaatatcgttcattagaggagctgacagatccgattaaggtcgtgatctatatgggtggccatgaggagctcgtggatgagattatcgagcggatcgaaaagacagataaggcccatatccgctatcatgcgcatgaaaaatgcatctatctcaatccagcagacacgcataaagcgataacagtagaagaactctgcggagagaatttcgtggcttttggcaatgatcaaaatgatatcgagctctttgaaaaagctctttatgcagttcaaattggtgattttccagcccttcagccttatgcggatgatcaattggtagccaaacaaaatcaaccacaagctgtggctgctaagatcttgcaagtctttgcagaattcagaggaaaataaaagatggagggggagtcgtggcttctcctttttcgctagaaatgaggaaggtatgagaacagttcagaaagaagagatccagcgtgtcattgcaaggcgagaggcgaattcttataagggcgattttggtcgcctgctcttgattggggggacttacccctatgggggagctattattatggcggcgcttgctgcggttcatagtggtgcggggctggttactgtcgcaacaaatcctgataatctgacggctcttcatagccatcttcctgaagccatgggctttgatttggcagatcacgaactcctttgtgagcaaattcaaaaagccggtgtgattctagtcggtccaggcttaaaggaagcaagagaaaaccaagcaatcttgcacatgatttttgaacaagtctctagccagcaggtcttgatcttagatggaggagctattagtctttttgcagcctctcagtttgacctgccagaggctcagttggtctttacccctcatcaaaaagaatgggaaaaactgtcagggcttgatctagcaagccagactgaagatagaagccgagaagcggttcaaagttttcctaaaggaactgtcattgtagaaaaaggcccccacacccgcatttggacaagtgggcaagaagagggctatcagctagatgttggtggtccctatcaggcaacagggggcatgggggataccttggcagggatgatcgcagggtttgcgggtcaatttccacaggtcagtctctatgagcgcgtggcggttgcgacctatctccattcagccattgctaaagacttgagcaaggaggcctatgtggttctgccgacaaccatcagccaagaaatccccaaatggatgaagaagtggagtgacaaagatcaggttatcagcactgaaaatagaaaataggaaaaaaagatgaaggaaagcattcgaaaagcaaatcagtatatcgatgaaaacagggagaaggttaaccagctatatagaggagcatttcatttgctacctccaatcggctggatgaacgatccaaatggttttgtttatttccgtggggaataccatttgttttaccaattctatccctatgatagtgtttggggtcccatgcattgggggcatgccaaatcaaaagatcttctccattgggaagatctgccagtagctttagcaccaagtgaaagctatgataaggatggctgcttctcgggtagtgctattgtgaaagatgacaagctctatttgctgtatacgggtcatgtagacgatgaggaaaagcgcgaggagactcagtgtcttgcggtttcgacagatggcattacctttgaaaagttgcctactaatcctgtgatccatgctcaacatattgaggggatcgcagatattgcagattttcgtgatcctaaagtatttgaatatcaaggaagctattacgctgtcgttgcttctaggacaccagacgacaggggtcaaattctcctatttgcctcaagtaatctagtagattggacctttacatcagtccttctagaaggtgaaaaagggcaagggattatgtgggagtgtcctgatttcttccctttagatgacaaatgggtcttgatcctgtctcccattgaaatggaaaggcagcaagaaaaatactggaacttaaattcgacagttgcctttatcggtgacatgaattgggaaacggggcgctttcatgtcgattcctatgatgaaatggatggtggtttggatttctatgcccctcaaacttgtcaaggaccaaagggcgaacgatacatggttgcctggatgcaaatgtggcaccggtctatccccagtcatgatttagctcatgggtgggcaggtagtatgactcttccaagaaaattgtccttgaaagacggacgattggttcaggagatacctgagtcagtgaacgaacactttcttgtagagcatgcctcagaaaccattgttaagggcaatcagatcacgatcccagcgaaagggaaacaaaccttgtttgaactagatgccaaaccgggtcgctcctttatccttggttatggcgatgaaactgatcctgatagtgtcttgcaattggtttacgacgcctctcaaaaacgctttagcttaagtcgagaccaatttgggcaccccatttctggaaaagaaaatccagcatttcaatcgagacggattcagttggatgctgaaaaagatcatcatttttcgatcattcgcgataccaactcaattgaagtattcgtggatggcaaaactctctcgatgactttttatgaaacgactgagaatcccgtctatactctcacagcagatgaaggggtcaattgggtcgtaaaaacctatcaaaaataggaaatcaatagcctcctaaagaataaaaagacaagtcttgtgacttgtctttttattctttaagagaggacagaagcgaggagccctccgagaatgaggatgatagccccgctcagtcggttggccatttgggcgaaggcgatcatttccatgcgatcggatgcggagagaacagcgatatttccggttcctcccatcgagttattgatcataccagatccgatagcagtctcgactggatacaatccaaccagttttccgatcaaagcagaagcaagccccatagctaccacagaggtcaagcttaggagaatgaattgccaggtcatcgccttagctagagttgaaagatcaatcaaggaaagaccgatcccagctaggactgcatgggtgaggttggtcataatgacttggttgaacatgaccacacagttttccaaaggttttgggacggcattgaaagctttcaggataaagacgatgataatcatgaaggcataactgtggatttttggaacaaaggcattgcagatgaccccgagaagaaaaatactaaaggcaaacatcattccaactcccgattgggtcggatcaagggtgagtttttctttcttcaattcatctttattgaccggaatcaagacaccgtgaccattgtaaggactatctgcaaagactttgacgatcaaaacagcaccaatgatggcaaggatattaccaagtgtggtagcgggtgccaattgagagaagatggctgcttggcttccgtggagattggcagcatagatctttgaaagaggcaggattccagctcccattcctccgaccatttgtgggaaggaaacatagagaatcgaatgtccaaatccttgtcccaaaaggcttccaacgatcccaacagagagagcaccaacgaccatggtgaccaaggaaacaggaataaagcgagcggaagcttttaccaaaagattgcgattcatccctagaatagccccacaaatcaaggctgcgatataaaaatccagaaagccaaaggaatctcccaaaaagcccttggtggctgtgataatgtttgctggaataacatggtaggtcgctagaagagtagctcctagtaaggtgaagacagatcccccacctaggtaagaattcatgattggaagtttatcaccgataaagtagagaagatgccccatgacgaccaaaaggagggttagtccaagcatattgagtgggagtttccccatagcaatcgtcaccgcaagaacgatgacgataaatgcatacagaggaagactgacaccggaaattttgatttcattcaattttttcatggttgttcagtcagctccttattagtatttaggataccatttaaggtcacgtacagctttggccatatctgtttctttagcttgtgcaagcccttgttcttgagctttcttggcaacagcttctgctaccttgatagatacgtcagctacatattggaatggtggaaggactggcgcacctggttgacctggattgacaatacctgacaatgagtgagctgctgccccgatcatttcgtctgtcaacaatttggcttcagaggccaacataccaagaccaagacctgggtagatcaaagcgttgttggcttgaccgatttcataatcaacacctttgtagctgatggttcctgaagggacaccggtagcgacaaaggctttaccgtctgaccattcgatgacttgttgggctgttgcttccaatttcttggttgggttagaaattgggaagataaccgggcgttcagtgttttcacacatggcttcaaccacttctttagtgaaggcacctgggtttgtagaagttccgaccaagatcgttggttttactgttttgatcacttcaagaagactggtcatatcgcctttaccttcgaagtcagcgcgttttttagcaaatggtttttgagctggcgtcaaatcttccatatcgtcaaacaaaagaccttgtttatcgatcatgaagaaacgtttgtaagcttcttctggagaaagcccttcagcaaccatttcagcgtgaacacggtctgcaataccagcaccagcagaaccaccaccatagcaaaggtaaacttggtctgtcaatttttcaccagtgatatccatcgctccaaagataccgcccaagacaacgatcccagttccttgaatatcatcgttgaaagttgggatttctttcttgtaacggttcaagatatcagccgcatttgaacgaccgaagtcttcccagtgaaggtacaatttagggaaaagttttccagctgtttgaacgaattgatcgataaaggcatcgtatttttcaccacgaacacgttcatgacggttcccaagatacattggattgttcaacaattcttcacggttggtaccagcatcgatgacaagaggcataacgcaagctggatcaattccggctgctgcagtgtagaccatcaattttccgacagagatgtcaaccccttggataccccagtcaccgataccaagaattccttctgcatcagttacaacgatcaagcggatatcgcgatcgccagccgcatttttcaacgtttcttcgatattttctggatggttaatatcaaggtaagcggcatattgtgggtctacaaagagttcagaatattgttcaatggtgtctgcgatcactggatcatagacgattgggttgaactcaacgatgtgttggttaaagaggtagtagaaaagagtacggtttgtattgaaaatttccatcaagaaaagacgtttttcaaggtctgatggtttgcgcaagaaatgttgataagcttgttcagcttgttcttcgatggtttgaacatatggaggaagaagaccgatcaggccaagttctttacgttcttccattgtgaaggcagttcctttatttaagaaaggattgtttaaaatttcatgtgatttcattgcgaaatactcctcataaataatttatctgtaagattttttctcacgcaagccattatagtcttctgtaattcttatagtcaacttcccttgtccttataaaaaaattttataagtaagagttttgtgttagaatgaaggaaatggaaattgtagaaatagagggatagagatgaatatccgagacttggaatatttttatcaactgtcgaaattaaagtcttatactgatgtggcgcattattttcaagtgagtcaaccgactgtgacctatgccatcaagcgtttagaggagcactatgcttgccagttggtggaaaaatcgtcttctaatcgtgtcttgcacctaactcagccagggaaggttttagccaatcacgcgcgagaggttttaatcgaaatcgaaaagacagaaaaagctgttgaacgaagtaaaaagaatctgttgcgtattggactaccgcctttgatcactagcgatatcatgaaaaaatttgggacgcatgatgaagaacttgagatttttcgtcaatcgcaattggtgcaattaggttccagggatttgatgcgattgttggtgcgtggagatttagattttagtttactgggaagcttagagcccatttcgcacgcgcatttgaccagtcagctcctgtataaaaaagaattttttgtgattgtttcaaaggatcatccactagcagatcgcaaggaaatttcttttaaagaggtgttagaggagaccttcattctgttagatgagcatcatgtgcacatgacggcttttaaacgcttgaatgctcgctttgatgatttggcccagtctactgttgtcttgaccgattccaacttggtcttgagtttcatcgaagaaaatttgggaattggtctcatgaccgatctgactctctttccagaatatccaaatcttgtcaaaattccgctggttgaagaggaaaaaacagacttctatattagttatgcctatccaaatgaaggggaaccccaagcgcttcttagctcctttattgaacggttagagaagtgtgaaaaataaagaagctggtgtcaaacagacaagtagaggggtaacttgaataaaatgaggcttgtagagaaaggaaattcatgatttcgctttgtctgccagccttttttggtgttttttggtataattaaacttgatcatattctgcagaaaggagttcctatgtccaactatttatccgtatcaagtttgaccaaatatttgaaattaaaatttgataaggatccctatttggaaagggtttatctgacagggcaggtctccaatttccgaaaacgccccaaccaccagtatttttcattaaaggatgaaaaagcggtcattcaggcaacggtctgggctggggtttatcgaagctttggttttgagctagaagaaggcatgaagatcaatgtcattggtcgcattcagctctatgagccaagtgggagttattccattgtcattgaaaaggctgagccagatggggtaggggccttggccatccaatttgagcaactcaagaaaaagttgaccgaagaagggctctttcaggatcgatggaagcaagctctgccacaattttcaagaaagatcggggtcatcaccagtcaaagtggggccgtgattcgcgatattatcacaacggtgagccgacgcttccctggtgtagagattgtgctctacccgaccaaagttcagggtgaaggagcatctagtgaggtggttgctaatattcaaagagccaaccaacgggatgatttggatgtcttgattatcggtcgtgggggtggttcaattgaagatctctgggcctttaatgaagaagcagtggtgcgagccatttttgaatcgcggattccgattatctccagtgttggacatgagacagatacgactctagccgattttgtagcagaccgacgagccgctactccgacagccgctgctgaattggccactccagtaaccaaattggatctcttgtcccatttacaaaagcaggaaaatcgtatggcaacagccatgtccaatcgcttggcctataatcgtgaacgcttggccaaattaagtcaatcggtcatttttagacagcctgaaagactctatgatggctacctgcaaaagattgaccagttgcaattgcgattgaaacaagggatgcgcgatgcttatggacaaggggccaatcagctgcaaggtctgcgtcatcgcttagaagccatgtctcctttgcatcgcatcgagcgctaccaggaccgcctgctccaagataaaagaatcttaaccaaccgaatggaacaagtcctaaaagagcgaaagatcaaggtgcaaggcttatcagaagccctcttgatgctcgataccagtcggattattgcgcgtggctatgccatggtcaaggaaggagatcaggtcctggattcggttgcgaaagtaaaagaaggggacccgctgtcactcatcatgagagatggccagttagaagtagaggtaaaacatgtcgaaagaaaagaaatttgaagaaaatttagcagatttggaagccatcgtccaaaaattggagagtggagatgtggctcttgaagaagccattacagaattccaaaaaggaatgaagttgtcaaaagaattgcaagataccttggatcaagcagagaaaaccttggtcaaggtcatgcaagcagatggtactgaagcggatctagcatgagacaagaagaaaaacgaaatagagtagagcaagcggttcgctctttttatgaggagaaagccgttgccccccatttagtggagtcggtcctttattcgatccaggcaggtggaaaacgcctgcgccccttgctccttctagaattgttagaggcctttggacaggaattgacagaggctcattttcaagtggcaggggctttggagatgatccacacaggaagccttattcacgatgatctgccagccatggacaatgacgattaccgtcgggggcaattgaccaatcacaagaaattcggagaagacctggcgattttagcaggggatgcgctttttctcgatccctttggaatgatagctgcaagtgcccttcctgatgaggtcaaggtctctttgatccttgaattgtcggatgcttccggtagtcgtggaatggtagctggccaagtccttgatatggaaggggagcacaaacagctcacactagcagagttgcagaccatccatgccaataagacaggacgcctccttgcctatcctttcatcgcagctggtttgattttagagttgcaagcagacattgctcagctcttagaaaaaatcgggaaaaaattaggcctggcttttcaagtgcgggatgatattttggatttggtagctgattttgaagctttaggtaagactcctcaaaaggacttagtagctgaaaaatcgacctatccagccctgttgggattggaagaatcaaaagctttgctgacaagcgaattagacgcttgcgaggacttgttggatcagattacagctgcttgcaactttgatccgcgagcgatcaagaaattaatagaaggattacgaatagatggctaaggaaagagtggatgtattagcctataaacaaggcctatttgatacccgcgaacaagccaaaagaggggtgatggcaggtcttgtcgttgccgttatcaatggtgagcgcttcgataaaccgggtgaaaaaattgatgaagcaaccgagttgaaattaaagggtgaaaagctcaaatatgtcagccgcggtggtcttaaattagaaaaagccctgaaccaattcgatttatctgtagagggtaaaattacgattgatattggagcttctacaggtggctttacagatgtcatgctgcaaaacggagccagccaggtcttttcggtggatgtcgggaccaatcagttggcttggaaattacgtaatgatcctcgggtagtctcgatggaacagttcaatttccgctatgccgagccagatgattttgaagcgacaccgagctttgcgagtatcgatgtcagctttatttccttggatttgattctgccagcccttcaccggattttggcagaaaatggacaagtcgtggccttggtcaaacctcagtttgaggcaggacgcgaacagatcgggaaaaatgggatcattaaggatcctaagattcatttagccgttcttgaaaaggtcgctgcatttgcaggggtacatggctttgcggtaatgggagtggattattcccctatccaaggaggccatggcaacatcgaatttttgatgtatctagaaaaaaaagaagagaaaacaaagccgactacagagcagctggaggctgttgtggagctggcacacaaggaatttaaacatgaagagtaagaatatcagattagaaaaaattcgtcgtttcattcgcgatcatgaagtggggacgcaagaagagatcgtcgaacatttgaaagaagaaggcatctcagcaacccaagcgacagtatcacgggatatcaaagaattgggcatcgtaaaacgccctctgaaagacatgacctatgtctatgaattgccacgtaagcaccaccaagggatcgggatgatcgaaagcaatatcttgtctcatcgtcgcatgggagaatatgtcaatttcaccatggttccagggacagcgcctttagttaaacgtcgcttgcgggagatttataaggagcatatctttagtattgttgcagatgatgatacgatcttgctgatcgcctattcagctccagaagcagagaatatcctcaaatcaatctttgggtggtaagagcctatgctattagaaatttcgattaagaactttgccattatcgaagagatttccttaaattttgaaaagggaatgacggtactgacaggggaaacgggtgctggtaaatccatcattatcgatgccatgaacatgatgctgggaagccgtgcaacgacggatgtcattcgacacggagccccaaaagcagaaattgaaggcctcttcactgttgagagcaatcgccacttgacggctctctttgaagaacaaggactagagtggactgatgaattgatcattcgccgagagatcctgcaaaatggacgaagtgtcagccggatcaatggtcagatggtgaatttatcggtcttaaaggcagtcggtcaacatttggtggacattcatggccagcatgatcaggaagaacttatgcggccccaattgcatattgctatgctggatgaatttggagatgcagcctttttccaaaccaaagacgcgtatcgtcaaacctttgaagactacaaacgcctgcgcaaacaagtggtggcactccagcgcaaccagcaggaaaacaaggcccgtattgagatgttggagtttcaaattgcagagattgaggcagcttccttggaagtggatgaggacctgcgtctggagcaagaacgccaacgcctgctcaatcacaagatgattgcagataccctaaccaatgcctatactatgcttgatgcagaagaattttcgagcctctccaatgttcgctcagccatgaatgatctggaaagtatcgaagaatatgataccagctacaaagagctctcaggccagttatcggaaaccttctatgccctcgaggacattaccaagcgcttagaagatgtggtcgatggtctggagtttgatggcaatcgcctcatgcaggtggaatcgcgtttggatttgatccactccatcacgcgcaagtatggtggccaagtcaaggacgtcttggaatacctggcgcaaatcaccaaagaatataacctcctcaccggaagtgacctctcgtctgaggacttggaaaaagaactcaaacgtttggaaaagagtttggtcaccttggctcaagatttgagtgatcagcggcatgccctggcccaagctttggaaaatgaaatccagcaagaattggcagatctctacatggacaaggcgcgttttcaagtacgttttagcaaggctaagtttaatcgggagggaaatgaagctgtcgaattttacatttcgaccaacccaggtgaggactttaaaccccttgtcaaggtagcatctggtggagaattatcgcgtttgatgttggccattaagtcggctttttctcgaaaagaaggaaaaaccagtatcgtctttgacgaggtggatacaggagtctctgggcgcgtggctcaagccatcgcagcgaaaattcataagattggtcaaaatggccaagtgcttgccatttctcacctgcctcaagtcatcgctgcagcagattatcaattctatattgagaaaatcagtgatgaacactcaactgtatctactgtgcgtttgcttaatagagaagaacgaatcgaagaaattgccaagatgctggcaggagaggatctaacggaagctgcccgtcaacaagcagagcaacttctcaagcgttaagagaaagaaggtttgaaacaatgtcaacatactttgtagtcggagatattcacgggaaagcacaaatgctagaagagctcatgacagagtgggatggaaaagctcaattggtctttttaggggatttgatggatcgaggcgaaagcagcaaacgatcgattgaaatcgtaaaagactatgtagaccatcacggagctgtttgcctttccgggaatcacgagtacatgtttttagcttggttggacaatccagaagagcgttatgaccactaccgaagaaatggtggcgatacgaccatcaactctttgttaggacggccactcgatgctcctgtagatggcattgcggatgcgcaagcagtagaaaatgccgttcctgacttggtggccttcatccgtagtttgccttttgactacgagacagagacctattattttgtccatgctggtgtggatctaacccttgaaaattggcgggaaaccagtgattaccaaaaagtctggatccgaaaaccattccatgaagcggagaatcatacaggcaaatggatcgtctttggccatacaccgatttatggactgctcaatgagccggtcggtaccgaaaatctttggatttcagatcagaaaatgggcgttgatggaggcgctgtctatggtggagtcctccatggattgctcttggatgatcaaggtatcgtccatgaccatgtccttcataatacaggtttttctgccgcagacgactgaggaagcaggaatggatatctttcactgcaaaaccccgtgttttttgatataatgaaagcaaaacattcttaggaagagtatagaaatatatggcaaatattaaaatagttacagactcatctattacaattgagcctgaagtagttaaagaatatggcatcaccattgtgccactttctgttatggtggatggagttctttactctgacagtgagttgggtgaaggggacttcttgcgcttaatgcaatctagcaaaaatcttccaaagaccagccaaccacctgttggagtctttgcggagatttatgaagacttagcactggatggatctcatatcgtttcgattcacatgtcccatgccttgtcaggaacagtagaggcagctcgccaaggggcaaccttatcaggagcagatgtgaccgtgattgatagtggtttcacagaccaagctatgaagttccaggtggttgaggcagctaagttggccaaagaaggagcagatctagacaccattttagctcgtatcgaagaagtcaaagaaaaaactgaattgtacattggcgtatctaccttggaaaatctagttaaaggtggtcggattggtcgtgttaccggacttttgagctcgcttcttaacatccgtgtggtgatggaaatgaaggaccatcaattagaaccaatcgtcaagggacgtggaaacaagacctttaagaaatggttggatgaattggtagagaaactatcccacagcaaggtagctgagatcgggatttcttatgcaggaacaccggagtgggccaatgaaatgaaggctcagttgcaatcactcgttgaaaaagcaatccctgttttagaaaccggctcgattattcaaacccatacaggggagaatgcatttgcggttttggtacgctaccaataagctctaataaaagttcgaaaaaacaggtttagtacttgacctaaaggttttttttagatatgataatactgttaaggcatgaagcctaaaaaatattggaggatttgttaaatggctaacaaacaagatttgatcgcaaaagtggcagaagctacagaattgactaagaaagattcagcagcagcagttgacgctgtatttgcagcagtttcagaatacctttcaaaaggtgaaaaagttcaattgatcggttttggtaacttcgaagttcgtgaacgtgcagctcgtaaaggtcgcaacctacaaactggtaaagaaattgaaatcgcagcttctaaagttccagcattcaaagctggtaaagctcttaaagaagcagttaaataattgcattttgaaaagccatcctagatttctagggtggtttttttgttggacagctctataggataaggatataataggaaaaaaaagagagagaaaagaccatgcgattcattttaggactctttgccttgttgtttatccgacctattttgtatctactgaaagggctatggtttgtactggaattttgctttatgatcctcgtggttaagatgatcctaggaaccgtacgctggatgaccagttggatcggctgagcggggggagaggaatttattaaatgttacgttacgtagtagaattaagtttgatgcttaattctttttttataaaaaatttcactaaataagaattattttcaaaaaatacttttttttttagcaaccatagtataatactgtggagcatgaaagtaaagtaggaaagggagcaattaagaaaagtttatattggttgtctgtattactatatgtaatttggaaatgttcaaattaatacttgtatataagatattttggtaaccatgtaggacatatattatataatcaatagaatttagttagttctaaatgtataaaataggagaaaagtaagatgaaaacaaaaactttggcactttttagcggaattgttggtttagttggtggtattttactattagttgggccattctttattcttggtactgcagctgctacagctagttcagatgcaactgctggatcaattcttttattaaatgctttgaaaattgcaaatctagtattgggaattattgcaattgtttattacaaaggtgatgagcgagtaggtgttgctccttcagtgctactgattgtaggtggatctgttgcgattatcccattcttaggatggattggtggtatcatcgtattgattggtggttcattattcctcggttctcttaaaaaatttaaaactaattaattagttttatttttgagataaaaagtcgtatatagacacgtgaatcaatgtccgctggacatgaacttgcttctccgttttcaggctcgtgaaaaaaatgtcccccggacattttttttaattaaaagcattctaaatagtgatttattttgaaacatgctataataggagtaacgaatcgattaaatcatattggaaagggggaaacatagtgaacgcattgcgtcgtcatgaacaagagcgcgtggaagaagtcttgcaaaatttgcgtgccaagggtattcggattactgatacccgcagagcagttctttcctatttagtggcgagtcatgaacatccaagcgctgagaagatctatcgcgatttattgcctcagtttccaagcatgagtttagcaactgtctacaacaatatcaaggttttgattgatgagggggttgtctctgagattaaggttcgcaatgataccacgacctattttgatttcatggggcatgaccatttgaatgtggtgtgtgaaaaatgtggccgtatcgcagatgtggacatcgaagtaccagatcttcgcgaagaagtagcgagtcaaagtggttaccagatcaccaagacccagatgaccgtctatggcatttgccctgactgtcaaaaacaatgataaagacattccattagagccgtcaggctcttttttgtgagaaattgcacttttctatggtcgccactagattttttactgaaaatctagtagaataaaatagataaacgggggaaacctcggagaataaaaaggagatccatctaatggtaaaattggtttttgctcgccacggtgagtctgaatggaacaaagctaaccttttcactggttgggctgatgttgatttgtctgaaaaaggtacacaacaagcgatcgacgctggtaaattgatcaaagaagctggtatcgaatttgaccaagcttacacttcagtattgaaacgtgcgatcaaaactactaacttggctcttgaagcttctgaccaattgtgggttccagttgaaaaatcatggcgcttgaacgaacgtcactatggtggtttgactggtaaaaacaaagcagaagctgctgaacaatttggtgatgaacaagttcacatctggcgtcgttcttacgatgtattgcctcctgcaatggaccgtgatgatgaacactcagcacacactgaccgtcgttacgcttcacttgacgattcagtgattccagatgctgaaaacttgaaagtgactttggaacgtgcccttccattctgggaagataaaatcgctccagctcttaaagacggtaaaaacgtattcgtaggagcacacggtaactcaatccgtgcccttgtaaaacacatcaaacaattgtcagacgacgaaatcatggatgtggaaatccctaacttcccaccattggtattcgaatttgacgaaaaattgaacgttgtaaaagaatactatcttggaaaataaaaatatccagtggatatttttatcccgagcctgaaaacgcaaaagcgaggcttatccagtggatatttttatcccgagcctgaaaacgcaaaagcgaggcttatccagtggatatttttatcccgagcctgaaaacgcaaaagcgaggcaattataacgggatttgttatccatacaaaaagctgacttcggtcagcttttttgcttgccttccttagatcctagctggttttgggttttcagggactcctaaaaatgatataatgaagtgttattacataaggtttcattagccttgaaaggaaaagaaaatgacaaaatcattctacatcacaacccctatctattacccatctggtaaattgcatattggttcagcttatacaacgattgcctgtgacgtcttggcgcgttacaaacgcatgatgaactacgatgttttctacctgactggtctcgatgagcatggtcaaaagatccaacaaaaagcagaagaagctgggattacgccacaagcttatgtagatgggatggccgttggagtgaaagaactctggcaattactcgatatctcatatgataaattcatccgtacgacagacgattaccatgaagaagtggtggctcaggtctttgaacgcttgctggcgcaagacgacatctaccttggtgaatactctggctggtattcagtctctgatgaagagttctttacagaaagccaattggctgaggtattccgtgatgagaatggcaaggtcatcggtggggtagccccatcaggccacgaagtagaatgggtttctgaagaatcttacttccttcgcctcagcaaataccaagaacgcttggttgaatttttcaaatcacaacctgatttcatcacgccagatggccgtctcaatgaaatgttgaaaaacttcatcgagccaggcttggaagacttggcggtatctcggaccacctttacctggggtgtacaggttccatccaatcctagacacgttgtctacgtttggtttgatgcccttcttaactatgtgacagctcttggatatggtcaagaagatcatgaaaactttgataaattctggaacggaaccgtcttccacatggtcggaaaagacatccttcggttccactccatctactggccaatccttctcatgatgttagatatcaaattgccagaacgtttgattggccatggttggtttgtcatgaaagacggcaagatgtctaagtctaaagggaatgtcatctacccagaaatgttggtggaacgcttcggcttggatccacttcgttactacctcatgcgcagtttgccagttggttctgatggtaccttcacaccagaagactatgtggctcgcatcaactatgaattggccaatgaccttggaaacctccttaaccggacggtggccatgatcaataaatactttggtggtcaagttccgacttatgtcgaaaatgtcactgcatttgatgcagatttggctaaggtggtcgaagaaagtattgcagagtaccacaagcaaatgaatgcggttgattacccacgcgctttggaggcggtatggaatattatctctcggactaacaagtacatcgatgagacagcgccttgggtcctcgctaaagaagatggtgacaaggaacaattggcagcggtcatggctcacttggcagctagccttcgtgtcgtggctcacttgatccaaccattcatgatgaacacctcaaacgccatcatggaacaactaggcttgggcttggacttcgatctcgaaaacttgaccctagcaggtttccctgaaaatatcacagtggttgccaaaggaactccaatcttcccacgtcttgacatggaagaagaaattgcctacatccaatctcaaatgactgcaggcaaaccacaagaaaaagaatggattccagaagaagtggaactcaagtctgaaaaagatgagatcaaatttgaagactttgacaaggttgaaatccgtgtagcagaagtcaaagaagtggatcgagtcgaaggatcagacaaattacttcgcttccgcctagatgcaggagatggcgaagaccgtcaaatcctctctggtatcgcgaaattctatccaaatgaacaagaattggtcggcaagaaactccaaatcgtggccaacctcaaaccacgtaagatgatgaagaaatatgtcagccaaggtatgattctttccgcagaacacggagatcaattaacagtcttaacagttgatccgtctgttccaaatggaagtattattggctaaatgatagacaaagaaaaagctctcctggaagggagggcttttgttgtgacgatatagttcccatcattgagttttacaaggatggtagatgagtcctgttagtaatgaatattaatggagacttccgaagtgagaaaagagtctgaaacattttcgtttcagactctcggaagatttgagacagtgggctcaaatcttaggtatggaatcgcaaagggattcgctaccgtccgccctcacctaaggaagatctccaattatatttttaaatacatgttctattcatctggccggtattctaggatatctcctggctggcagtcgagttctttgcagatggcttcaagggtggtgaagcggatggctttggccttgccggtcttgagaatggagaggttagctgtcgtgatgccgattttatcggctagctcattggatttcattttccgcttggccagcatgacatctagattgacgataatcatggcaccctccttaaatggttagctcattttcttcagcaatctcaatccctctctctaaaatcttgccagagacccagacgattggaacggcaaggagaagccctgtgttaaaggtaaattggaaagtgaagggaaggagataagcatttccactggtttcaagtgtgccagacataaaggacaagaccaagagaatcttccaagctcggttgcaaagatcaatgttggagtgagaaaagatcttttcttggtagagattttggaggaagctgcgaatggtgaggagaaggtaaatatagatagcgcttgaggctagtgggaagagcagctgccagagaggttgtggatgttggggaaagagctggatgccattcgcatcaaaggacaagcgacctgattgaatgagatctttgaaaaggcccatgcgggaaagcagatggacgactaatgcagccacggtcataaagccacagaagtaaatgaaagccgtcaagacttcaatgacattttttaaggtttttgagtttttcatcgcaagcctccttgaagtttatttatttttcacttatagtatactccttataaaaaaatagtcaataagaagtatcgaaaaacgataaaaaaataatgataaacaaaatattgtttttgaaaaacaggtattctctactaaaactagtcagttcaaacctggaaaaccactacatagaggggaattttactatactttcgatttagggtatactagtgtaaagatcttattccatggaggtagtaaaatgaatcttaagtggaagaaaaaatacctggtaccgattctggggctggtcggagcagctgttctgatcggtggagtctatctctactctagttccaacatccaaccagaccatcaaaaggaatttaagcagaccagcaagaaggtcaccaagccaaaggaaaaagctattgacttgagtggtgactatgtctcaaatgaacgggatgaagccaaaatcgagaaaaaaggcaaggcctggaagatcgattaccaaacggctgatggcaaggtatccgctgaatttagcacggattggaaggtcgaagggtctaacaaagtttcgacaggcaagatgaaaaagtccgatggcaatacagactttacagttactgttcgtgtctttaaatacaagacagataagaagcctttgatcacggtcaccatgtctgacaaaaatcccgaccacgagatggtctttgccaatcgggaggattttttcaaatcgacagatccaaatgatgtcgtccttgatggcaatctctcaccgtttgaaggtgcttattccaatgatacctatgaaaaggaaatcgccgattccggttttaaactttatggctatactccagaagaatattaccaaaacaagaccaacgcctttccgagcattgtaaatggggagaccggctggactttctggagtggaggcactcgggcaagttacttgttcaataaagaaaaagagcctaagaagcgaaaaggctattatgaagtttatttcactggggccaatgcgactgcgatccaagggcaagagcaaaccttgtacttgatcccagcaggtgtgacaggtcctgatggagtagcttcccaagaacgtcggattctctttggtgacgtggcctaccgagattaccacctagagtggtggaaagcttatccgcaaccgaaaaaagagaaagacttggatattgcggccattaacggaggcgacttctcaagcttagctggaacctggcgcaatggcaagggagctgagatcgtcatccaagcagatggaaaagtcaagggccaaggtagcctcaaggctgttgcggactcggataagaagagcaagatcccttatgttgagatgaagatgggtgagactggtgctgcgattggacttctgaaaatcggtttccaaaatccagatggagaccagtctgataccagcaagccgcgtctagtggtcactcaatctgcaggcaactacccggctgatcaatatttctaccgtcaataaaaaaggagattaatccatgggccatcacatcaactataagtgggctagtcttggaactggagttattgccaatgaattggcgcaagctcttgaagcgcttggtgggaaactctattccgttgccaatcgtacctatgacaaggggctagccttcgctgagaaatacgggattgaaaaggtgtatcatgaaattgatgacgtctttgaagatcctgaagtggatatcatctatatctcaacgcctcacaatactcatatccagtatcttcgcaaggccctcgcagctggcaagcacgtgctctgcgaaaagtccatcactctcaacagtgaggaattggcagaagcgataaagcttgctgaagaaaaccatgtcaaactggcagaagccatgaccattttccatatgcctatttatcggaaactctctgaaattgtggcaagtggcaagttgggccctctcaaggttatccagatgaacttcggttcctataaggaatacgacatgaccaaccgctttttcaatcgcaatctggcaggtggggctctactggatatcggtgtctatgccctatctttcgtccgttggtttatgacgtcacagccgacagagatggtttcacaggtcaagctggcaccgactggtgttgatgagcaagcagggatccttcttacgaatcgtgaaggggaaatggcgacggtgacactgagtcttcacgccaaacagccaaaacgcggtaccatcgcttatgacaagggctatatcgaactctacgaatacccgcgtgggcaaaaagcagtcatcacctatacggaagatggttcacaagaagtgatcgaagcaggagaaaccgctaaagccctccagtatgaggtcctcgatatggaagcagctgttgcaggagaggatgatcatacctacctcaattacagtcgcgatgtcatggacctcatgactcaactccgcaaagactggggcttggtttacccagaagaagaataaggttcggaaagaggctgggacaaaagttctagcctctcaattatttttggattgtcgagcaagacgcagtggttgagggggctctactacgctgatttcatcagcttttacagccctactcaactgtgcggaggtgggacgacgaaatcgaattctaacgaattaccgatttctgtcccactctctttttttactgcaaggaaggctcgtggagtctaggaaattgttagtctctagcattaaaaggaaaaaaatgtaaaaaaggcttgacaaagcaaatgattagcagtattattaactagttaattaactgattaataaactagttaacgaaaatgaaaaagaggtgaagaatgattaggagaaaaatgaaggttctgggactcttgtttctcggtttctttctactgacagcttgtggaagtcaaggaaatgcgggcaagccaccttctaaaaaaggtcttaaaattgtcacgagtttttatcccatctatgccctggtcaaggaaatctctggcgatcaaaatgacatctggatggttcagtcaggtgcagggatccatgattatgaaccctcaaccaaggaagtggcccagatctatgatgcagatgtatttgtctatcattctcagaccctggaatcttgggccggtcgcttagatcccaatcttcaaggttccaggttgcgagtgatcgaaggtagccaaggaatgacccttgataaggtggctggattagaggatgtcgaggctggtcagggaaaagaagccaagcacttgtatgatccacatacttggttggatcctgtaaaaattgcagaggaaggaaagattatcgcccagcgtttgggagagatcgatccaaagaacaaggagctctatcaggccaatgctcaaaagcttgaaaagcgctgtgaggacctagtagcccactaccaacctctctttgacaaggccaagcaaaagacttttgtgactcagcatacggccttttcttatctggccaaacgctttggtctcaagcagttagggattgcagggatatccccagagcaagaaccgactgctcggcaattggccgagatccagcagtttgtcaaagactacaaggtgaaaacgatctttgtggaaaagcacacgtcgtcaaaagtggcagatagtatcgccaaggcaacaggggcgcgtgtcaaggtcttggatccactggaagccgatccacaaaacgataaggatctattagaaaatttagaagaaaatatggcgactttggccaaggaattagaggagtaaatcaagaatgaagaaaaagggaacgattggtattgtagcgactttggggctaggactctgtgcctatgcgctcagtcagcaaccacaagtcaaggaagagaaaaagaatcagattcagtatttgcaagcagataagaaatcatcagcgactgcatctagcaaaaaggaagacagcatcgaagcggtcaatgccaaggaaaagacccaggcagagcagattgtcatcaagattacagatgaaggctttgtcacttctcatggggatcattttcattactatagcggcaaggtcccatttgatgccatctttagtgaagagttgattttgcgggatccaacttatcagctgcaagaagcggatatcgtgagcaaggtcaaggatggctatattattaaacgcgctgggaaatactatctctacttaaaggatgcccaacatacggttaatgtgcgctcaatcgaagagatcgcccaacagcaaaaaggaggcgctaaagaagaaggggaaacgggatcggtgcaagcgagctcctcgcacaaggcaggaaagacccgtgacttccgtcaacctagtcaagcgctgaaagaagggaagactcttgagatgctgacggctaagaaccatacaggtggtggctatcgtacggacgatggttatgtctttagccctggagatgtcatttcagatacaggggacggctttattgtgccccatggcggccatttccattatattccaaagagtgccttatccgctggcgagttagcagcagcactttcggtattaggcggtcaagccggccatcaggctggaagttcacacttagctagtccaagtgcagaagcaagcaaaaatcaagggactccagatcaggtatctccaagtctagggaaacaagctagcaaccaggtgtcaccaagtccaaccaatacacagacgaccccaacgacttctaaaccggctacctctaaaccaagtccaagcatgagcaatctgatcgaagaattgcagaaaactcctctatcttctcgtcatgtggagtctgacggttctgtctttgatccaagtaagattaccaagtggaccgatcaagggattgtctaccctcatggggatcatttccactttatcccatatagctccctatctcctttagagcgtgagttggcgcggcaattccaattgcttcgtgctcaaggatctagtagtccaacagaagtaagtccaagcttgccttcaaatccaagcataagaccagttgatcctgatcatgagcatggcgacagtcacgatcacaaagaggaacacgaccatggcttccacgcagacaaggtcatcagcaaggatgaggaaggctatatggtcgctcatggcaaccatgcccattatttctataaaaaggacctctctcctcaagagattgcagcagcagaggcaactctagctggtaagaaagaagagggcaagggtcagcccctgacagatgacgttgcgacctattctcgtgatgcctcagatgaggaaaagatccagtacatcagcaagacctacggtgtccctcgtgaggccattaagatttccaatggtttctttgtctttaacaatccagatcaagaatacgatccgacccacatccatccttatgctgttcgtaaggaacatgtccggatcccacttgaaactggcaatcctgaactagactttatcaatgaactctatgcaacagcgcttcgttcagggatttctccttatagccttcagattgaaaatggtcagtttgtcatcccgcatggcgatcacaaccactacatcaaggtgcgctcagcaggtctagcagactacttagcccaccgtcttccaaccattcaatctccttataaaaaaggagacttggacaagaaagtcgtagaggacaaggtcaaccagctcttagcaaaaagccgcagcctctatgcttctgatccattgcaacaaagacggattgagctcatcttgggccatttcttggaaaatgtcaagagtttcccaagtaactcaacagagggctatcttgcaagtctcaaacaggttgatgcgcagtacattcatgcgactcaagcggtcaaaccaaaagaagagacagccctagatcgtcgttaccaagagttgctggaacaagtgcgtttgctagacacagaagccttccaattgaagaaggaagagttggtctctcaattgcaggaagcctatactgccaaggacagcaagcgtctagagcaggaagggaagctattagaagctgttcaggagatgcaagatcggacgggtgtgacatctgtcgattacctcaagtatttctaccaaagcttgagcgatgcgcgcttgacaccagaactccgcactaaggcagcagatctagccttgaagctctaccgagctcaagcctttgaagaagcttgggattccaagtctcactttatggaactctaccaaaccaagcaagctattgaccagctcttctcccaagaaaaaggccaaacctatcctattgaaaaaacagttttggatctaaaaggaagtcaagccccatcctacaacttagcggtttatgatttcctcaaaggcttgtatggagagttggataaggcgacagaagcccgtcaacagaacaagattttgacagctctcttagagcaaatccagtcgctcttgccacaagtcgaagaccaaggcaaacgaactgcacttgaagcaggcttggctcaacttggaaaagaagctaatccagacaaggctatttcaagtggggaagcacttctacgcgaaatcagtgataccattgaaaagcaaaaacaaaagcaaacggaagagcctcaaattggggatgtcgctctttatcaacagctctataaccagttgatggccctgcaccaacaattggtggacaagggagctagtgatgctgtatttgatcgcttagaagctctctttgaccaattggctaatccaaagagtgataaagcagccttactacaggccatccaagctttccaggcagaattagctgcagccccatctgcaggcgaagtgagcaaaccagttaccccaactgaaacgcctgtccctacagaaactccggtagaaaaagaagcagcagcttcagaaggaagcaagcctgccacaactgagacagaaacagagcctgcaagcacagctgtaacagaagcaagcacgccagatgctccatctcctcagaaccaatagaaaagaggctgggacaaaagtcctagcctctcaattatttttggattgtcgagcaagacgcagtggttgagtgggctctactacgctgatttcatcagcttttacagccctactcaactgtgcggaggtgggacgacgaaatcgaattctaacgaattaccgatttctgtcccagcctctttttgcgttttagtgaatagaagaagttgtctcttttttcagtggttgagcctcactccttatgttcgaggagcagtggcgaggtaagctcgactgctttttttcgcttgaaaaatgcggccatttgaactaggatgcggggcaccgtctgccattttttccaagcttgaaagcgggtgtcgatgagctacttggccaagcgttctagcatttcccgctcggttggatccaaatcctgggcattttggaggatttccttggccttagctagctgtttgagatcggtaaggtcattgatggaagtgatgccggcatctagaaaaatgccaaaaaaggtgtcaaaaaacttcttgcgctcctctgccgatgtttcacgaacccattgcttcaaggtcagatcggtctgctggctatcgggactggtttcagaaacggtcacaaagctgtagtccttgatttcccaagtaaaggcgtcgtgctgggcaaagccaccaaaggcgtgacttttgacaatggtcgttggttctggcacttccagcatcatgccaacaatggacccttgagggacaaagcgccgaatgtttggggacgtgcgttggtagccttcggtttcgataatggccttgttgaggccaggagcatcgtagctgtagatcacgtctacccgttcaaataaggaatccggtaggtaagagcaggcataggttgcaagattccctcctttggagtgaccggctaccaagaagcgccctttcggaaattccttcatgacattttgcaggtagctggctgcacgtctttgagctggaacatggtccatataggtcatgtggaagtcttccttccagccgatcaaggtgtcatccgtccctctgaaaacgaccaaatacgtatccagactaagccgataggtcatggccgcaaactgtttttgtacatcgggatcgtactcatcgacatagttaaggagtttgatgttcttaaagcgctttgaactagctaattcattgactaattggaggtgctggttactcacgatgaaatcggttgtccggtcgatcagttccatcgcatcagacaggcgcactgggattcctgttgtatctccttgaggcacaatgtgtccaaagggcagataggtcagctctgtcaatgcgagaacatccagttctttgaaggggcggtcatatatggaatcataagtcacttcttttaggtaatcaaaaatcgtcgacatctgtgcctcccgtgtcttatttctttcagtatagcacaaaaatggatgtagaaaaagcgcctcccatcaagaaaggaggacccagcttttctttccctctgaaacagcctttttctctgcctcttaatctgttataataggaagaagaaaaaaagaaggaaagaaagccatgcataaaattctcttagtggaagacgatgaaattattcgccaacaggtcaaacaattattggaacaatggggctatgaagtggtcgcagtagaggattttatggatgtcctcgggatctttgtcgaaagtgacccccacttgattctcatggatattggcctgcctctctacaatggttaccactggtgccaggagattcgcaaggtttcaaaggttccgatcatgtttctttcttcacgggatcaagctatggatattgtcatggccatcaatatgggtggagacgactttgtcaccaagccttttgaccaaaatgtcctccttgccaaggtccaagggctcttgcgccgttcctacgaatttgggacagatcaaaatctgctggagcaccggggagccatcctcaatctcaagtccacggacttggtgtatgaaggggaagtcatcaagctgaccaagaatgaatttcagatcctgcgtgtcctctttgaacatgcaggcagtatcgtggcacgcgatgacatgatgaaggagctctggaatagtgacttctttattgatgacaataccttgtctgtcaatgtggcccgccttcgtaagaaattagaagaggctggcttgtcaaacttcatcgaaaccaagaaaggcatcggttacgggttgacccatgaataaatttggaacgatcttctggcagtatgtggtatcccgcaggcgcctactctatctattggtcatctttttgatcgtcgatttggtctttgcctatctctttccagagacagggacggttttcctctatgcgaccttggtgctaggcttttttgccctctgtgtcttgatctgggattttgccatgacctttcgggactaccgcaaagccgcactttatgaggaaatagaggcaagctcacccctggaacatctcctttatgaaaaatacacggaagaacagcaggcgcgcttggaggaagggaagacagcccaggccaagttcaatgacctgatggattactataccctctgggttcaccagattaagacgcccattgcggccagccagctcttggtgcaagatgtcgagacgcccattgtcaagcagcagatggagcaggagctttttaagattgactcctatgccaatctggttttgcagtacctgcgactggagagttttcatgacgatctagtcttaaagcgcgtgtcggtagaagacttggtcaaagaagtagtccgcaagtatgccctcttttttatccaaaagaacttgaccgtggatctgcatgatttggatcaggaggtcatcaccgatcgtaagtggctcctggtcattatcgagcagctcttgtccaatagcctcaagtacaccagtaccggtggaattgaaatctattttaaagaccagactctctatataaaagatagcgggattgggatcaaaaatagtgatgtgcttcgcgtctttgagcggggcttctccggctacaatggccacctgacccagcaatcctcagggctggggctctatctatctaagaaaatcgcagagcaattaggccataggatcaccctccattcagaggtcggccaaggcacgacggttgccattcactttgaagagaagaagttggtcatggattaagatttccccatcttacaaaaatgtaagaaataaaggtcaaaatgaaaggttaggttatggtagccgccttttattttttatacaatagtctcatcaaatgaaggaggtcaagaaaatgaaactcttgaaatggatgaaacaacctaaaaagattaagaaaccaaatgagcaaaccgatctggaaaagacggaatttggtctccaagtcctgcaacaaacccaagaatttttcttgatctactagtaaaaggagaaaagtatgtcattgttagacgttcaacacatcaaaaaaatctacaaaacccgctttcaaggaacgcaggttgaagccttaaaggatatccattttaccgttgagaagggtgaatatgtcgccatcatgggggaatcaggatctgggaaatcgaccctcctcaatatcctggctatgctggatcagccgacggaaggacgggtctatctcaatggcaccgatacctcaaccatcaagaacaaggatgcgtccagcttccgtcgcgaaaaactaggctttgtctttcaagacttcaacctgctcgacaccttatcggtcaaggacaatatcctcttacctttggtcctttctcgcagaccggtcaaggaaatgatgagcaaggtcgatagcgtcagtcgggagttgggcattcaccagctcttagaaaaatatccctatgaaatctctggtgggcaaaagcaacgggtggccgtagcacgggccattattacctcaccagaaattctacttgctgatgagccaacaggggcgctggattccaagtcttcagcggcattgctggacgtctttgaagatatcaataccatgggccaaaccattcttatggtgacccactcaaccgcagcagcagctcgggccaagcgcgtgctctttatcaaggatgggatcctttacaaccagatcttccgcggggaaaaaacagagcgtcagatgttccaagaaatctcagatactctgacggtcatggcaagtgaggtggagtagatgtttcgattaaccactaaactagcttgctccaatctgatcaagaaccgcaagctctattatccctttgcgattgcggtcattctcgcagtgaccatcgcttacctctttgactccctgacttttaatccccgcatttccgagcttcgagggggctcttccatagtgttcactctcagcttggggttcttcgtggtcaatgccgcgggagctatcatcgtgctctatgccaatagcttcgtcatgaaaaaccgctccaaggaactgggcatctacagcatgctcggccttgagaaacgccatcttatcagcatgatcttcaaggaactcttgctttttggcttgctgactatctcagccggcgtcttgattggagccctctttgacaagctgatctttgcctttctcttgaaactcatgaagatgaaggtccagctagtatccactttccaacctgggattgtcgtcttggtctttgtcacctttggtctcatctttggacttttggttcttctcaatgcttggcggattctccgtttgaatgctctgcagttgacacgtgagaaggccagtggtgaaaagaaagcccgcttcttgtggccccaaactatcctgggcttagcctctcttggttttggctactatctggctgtatctgtcaaagaccccatcattgcgcttgtgaccttctttctagccgttatcttagtcatgatcgggacctacctgctctttaatgcagggatcaccgtcttcttgcacctgcttaagaaaaagaagagctattattaccagcccaacaatatgatctcggtctctaacctcatctatcgcatgaagaaaaatgcagtgggacttgcgactattgcaatcctctcgaccatggtgctggtgacgatctctgctgcgaccaatatttatgtcggtggcgaaatggtcaagaaaatcatggcgcctcatgatttctctgtccaaggaaaaggggtcgagctggagcagatcaatcaaaaatttgatgaatttgcctctgagcaccatctcaagatcaagagtcgtgacctgatgacctatgccaactttggggttaaatcacaaaagggcacagatttcaccgtctatccagctgatgaacgcagcgtcactcctaaaaccgtctttatggtctttgatgtagctagttatgaacacatgacaggcgaacacgttgatctgacaggcaaccaagtcatcctctttgcccataacaaggatcttaaagggcaaaaacagttcactatcaatgggcaagacttccaagtcaaggaagaagtgagcaaggattttatcaccgatcatgttccaaatcagtttaatatgctgacggaggatttcaactacctgatcgtgcctgacctctcagcctttgtcgctcagtttccaaatctggccatcaataccaatatctacggtggcttcaatgtcaatgtcgatgaagatcagcaactcaagctagcagctagttatgacaagatgatcgatgaattgagcagccaacagggtcaaggaacatttatctatggaggtaaccgagccaatgatgtggcagagttgaatagcctttttggtggcatcttctttatcgggattttcttgtcactgatctttatggtcggaacggttatcgtcatctactacaagcaaatctcagaaggctatgaagaccgtgagcgcttcgtcatcctccaacaggtggggctcgatgaacacgaggtcaaacgaaccatcaaccgtcaagtacggaccgtcttcttcctccctctcatctttgcctttatccacctggcctttgcctaccatatgatccgcctcattcttaaagtgctcggtgtcatcaatagtggccaagtactcgtcgtgaccatcagcgtctgcgccgtctttcttatcacctacctgatcgtcttttggatcacctctcggagctatcgtaagattgtgcagatataaggaaaaagaagctcgaatcaaattagaaactttccttaggtgagtacggacgtcagcgaacttcgaagaagttccatgactaattattgagcctaaggtctcaataattccgagtgcctgaaacatgattatttcaggcacttttctcacagcggaaagtttcaatatactctaaataataatgagaaatcattttgagatttttgtacaatagtccagctaaggttattcaaagaaaagaattgtcaatttttaagctcgctcattgcgggctttttgtttgaaaaccgatgcgattgtttttgcttttcaaagggatataaaaaagactgaaccagtcgagttcagtctttgttcgctttctattaaagtgatgtaaggaaagtcaatcctcctaggatgacacctgccgaattcggaatgatcaaaatccagtcttttttaggttcctttgtccaaccataaatgacccagatcaagcaagaaatagcagctgacaagggttggaaaggttgggccttgtttccctgtaaattagcaataatttgtgggatgtaggcaatgaaaacgataatcccaataaaggcaccgatcgagccaacgatttggttgattttttgtttattcataaaattttacctctgtgtatcaaaatagcataaataggaagataatgcaattaatttgcatgctattcaagatgaaaatgattacatttgcaaaaaattagacaaagtgtctaaaataattactagagagaagactctctcgaagagaaatccatcttcctgcaaaatcacaagattgtgacactttacagttcggtaacatttgaaaaaaaagacttgaatttgtaaaggacaaaaggtagaatagtgcatacttaaaaaagaaaaggaaatggtagtttcaaaatgaatgaaaaacaaatgaaaattcttggttgggttgcgacctttatgtctgttatgatgtatgtgtcttacttcccacaaatcatggataacctcgcaggtcacaaaggaaactttgttcaaccccttgtcgcagctatcaactgtagcctttgggtttactacggactcttcaaaaaagaacgcgatattccacttgctgcagccaatgcaccagggatcatctttggtttgatcacggccatcacagccttgtaatcaatgaaagagagagtgggacagaaattggtaattcgttagaattcgatttcgtcgtcccacctccgcacagttgagtagggctgtaaaagctgatgaaatcagcgtagtagagcccactcaaccactgcgtcttgctcgacaatctaaagacaattgagaggccaggacttttgtcccagcctcttttttataacttcactcatttccatggtataatgggaggactattaaccgagaagatcaaaaggagacacgagtggatcaaaaacatcactgccaagtcctatgggcgaaaaataaatacctggtgctgagtcattccagcaatatctacaaggagatccgggaatacctcaagcaagaccaggtggaggttagccacgtcgaaggcttgatccagcaagcactggccttgccagaaaatcgtggtcaggtctccaattccttccagcatatctggggctatttcaaaaagcaggcgactcctgaggaaaaggcagactttatgttgctacttgagaaataccagcatggccaagctagccaggaggatctcatcaaggggatccaaaggcttctggagcgctatcccaatcgctacttgcaagagtcgtcactactaggaggtcaatagatgagactgtggcaccaagatttgattagcaaactccctcgtccccagcttctcggccaacaccgggaatgctgcgcccttcgaggcaatggctggggcaagaagcacgcgacagtcaactatgtctttgactactcgccttatcgcctctatgcctatcaccgcctgatcatggaggagatgagcgctcgtggctataaggttagcccagagtggtgggagccaacctaccgaggcaagacctgcccagcctatccagagctgaaagaggaagacttgagcacccctatctatcacgagcatcaggacacttacctccaagaatgcttggataacctagcagaaaaagggattcaattagactaagaaaaaacgaaccaaaccaggttcgtttttttgcgccaaatcccaacaaaatgctttgaaagcgttaatttctttcccaaacatgctataataataggagattatgtacaggaaaaggatagagggatgaaggcagtagcaactccagaacttgagattgaaagacagttaatccagcagttgacatcaggagagagtcagtggacttatcgccaggatctcaagaacgaagatcagttatgggacaatttctttgacaagctcgcgcaaaataatgttgccttgctggcggaccatcccttaaccgaccaagaaaagcgtcagatcaagaaccagctcaactttgtcagctactatgaagcggccaagtggctagcaggtgaaaatggcatcgccaaggtggaagttcaacgagaagatgccagtctaggaactatccgcttagcagtcatctggcgggacaatatcgcagctgggaagtcgagctatgaagtggtcaaccaagtcgaacgcgacaaggcctatccactagaccaggatcgacggctagatacgacccttctgatcaatggcctgcctctcatccatatcgaactcaagagtccccgagtggcctttctagatgcctttcatcagattaaaaagtacgaccgtgaaggcaagttccggggcatttactccagcttgcagatgtttgtcgtgaccaataaagtcgacactcgctacatcgctgcagcccgtgaaagcaagctaaataagcaattcctgaccaagtgggtagacaaggataaccagcccatgatcgatctcaacagctttgctcatgaggtcctctccatcccccgggcccaccagatggtcatgcagtactcagtcatcgacgatagtaagaaagccctcatcctcctgcgtccttaccagatccacgccattgaggctgtgcaggaagcctctcgccgtcaagagtcgggctatatctggcatacgaccggatcaggcaagaccctgacctcttacaaggtggcgcgtaatctcttgcagatcccagcgatccaaaagaccatctttgtcgtcgatcgcagagacctagaccagcagacaacttcgtcctttctctcttatgcggccaatgatgtcatcgacatcgacgagacggacaatacccatgaactggtcaagcgcctagggggcaatgacaagcgcgtggtggtcacgaccatccagaaaatcacgaccatgatgcgtaagttcgaagaaggaaagtaccagcgggatgccgggaagatcaaggacttgcgcgtggcctttgtcgtggatgagtgccaccgggcggtcacgccacaaacgcaaaaggagatcaaagcctacttcaagaactctctctggtatggctttacagggactccaatcttcaaggaaaataaacgcaagcaagtgggagacctggctcagactacccaccaacagtatggcgatcgcctgcatgaatacacggtcaaggaagccatccatgatggagcagttctaggctttaaagtagactaccgcaataccatcatctcggatctcctagaagaagagatcccagaccaggcctatgaggacaaggagcacatgctagaagtcctcgatgccatcctcaataagagtcagcaacagcttaatatccctaaaggggtcggaaagagctatgaggctattttgaccgtcaagtccatcccacgagcacaggcttattataatctgctcaagagcatgctcgctggcaaggagcgggtcaaggtctccgagcgggtcaaacgccatttgccagattttccaaagtttaccattacttactcggtgtctgaaaatgaggaagaatccatcggctaccaagaccacatgaagcaggtcatggaggactacaaccaagagtttggtacgcattttagcctagcggacctgcgaggctttaatagtgatgtcaataatcgcctggctagaaagcaggacaagtacctctatcgcaatgagcagttggatctggtcatcgtggtcgatcgtctcttgacaggctttgatgctccgtgtctttctacactctttatcgatcgcaagcctatgcgcccacaggacttgatccaggccttcagccggaccaatcggatctttgatgacaagaagcacttcggccatatcatcaccttccagcgccctcaagcctttaaggaagccgtcgacaatgccctcaagctctactccaatggaggagaaaatgaggtcttggcaccaagctgggaagaggagaagcgcaacttcttaaaagcatgggcagagtttaaaggccaagtcacagacttcgaagaagaaggagtcgccctcgagcaggccccaacggcccagctccgcaaggtcgctaaagcctatcaggtctttgataaatatcaagcctcgatccgcgtctactcagagtatgataaggaggagatctaccgggagaccggcctcagcgacagccagctcgaagcctatctaggcctctatcaaaatatcctggcagagatcaagagcagggatccagaagtgggcaacgaagatgagttggacatccactatgagctggagtctgtccaagtcgatgagatcaactatgcctatatcctgatgctgatccagagtatgatccagcaggaggaaaatgacgagcagaccctcagtgacaaggatatcgcaaccgtggacagctatatcgaaagcttgaaccgtaccaatccaagcctggccgagatcatccaaaacctctggacccaagtccaagaagagcccgaacggtaccgaggacagtccatcaccggagtcttggaccagatgatcgaatccatcatcgatagccatatcgtaagcttcgctaaaaagtggtatatcggagccgacgaactgcgctactatatccaacactaccgcaaaggggccaaaaaacaagccggagaaagccagctgaccaagagtcaacgctacaaagactacaaagcagaagtagcagatgccctcaacccactcagctacaaaaaacaaataaaagaagcctatacccaactaatcgaagaggtgattgaaccactgagagtggggagataggagaatatcggaggaaaaatggcggatacaatattgattttagggaacggctttgatttagccatgggtcgaaaaacaagttataatgattttttagagtttgctgagaaactgtttgctgaaagagatattcagctagaggattttctttatagcaatcagattgatattgaaaagtacagaaataatttatatattcaatttattaatgagaataagtttaaacttggagataattggtcaaatcttgaaataatgatttctcaacttgctgaagcaatagattttttccgactaaattccgataagttatatcacgaaagcggtgaattatacccaaaatatgttggtcaatttcataaaatgatgaatgaagagggaaattctgtttcaaaaatattcatcggtaccattttttttaaactttattatagctctggatgggataaactagagagagaattagctatatcagaattaaataatctttttattaatcatcttgatttactgactgagctcttagaaatttacctttcttatagagactatatagactttgaagttgaacaaattattcctagtgagacagcgttagacgctattgatagaatttcagagtcttatgtaattagtttcaattatacccatactccatataaactattcaaaattcctattgagaatacacattatattcacggagaaattaaattaaatagaagtaaatcagaaataaatacaatggtttttggaatagaagataaagaaattgatgttaatagcagtttgataccttatcaaaaatattatcaaagaattgtaaaagaaactggtagtgaatatttagactttctcaagcttagacgtgcggaaggtttatacggtggattaaagaaaaaaaatattattatttttggacattcagttgacccactagataaggaaatttttcaaaattatttttctttaacaagtcactatactgactattatcgatttatttttacatattacaacgagtctgctaaacgctctatcgttaagaatttagctataattctaggaaaagataaacttattgaattaaccggaaataaaaatgttgtgtttattaaaagtgatgatgttgatgggatgagaaaagttcttttgaattaaataatctttgaataagtatcacatttctgaacaaaaaaggagagtatatgtcgattaaaaaagaaaaaatacctatagtaagatttagaaatttctcagaaccttggttaaaaaaacagttgtcagaggttgcagaattttcaaaagggagagggtattctaagaaagatttgcaatctcacggaacaccaatcattttatatggtcgtctttatacgaattatgagtcagagattagtaatgttgaaacttatgctaatctggaagaaaactcagttgtaagtgagggaggagaagtaatcattccagcctctggagaaagtgcagatgatatatctagggcatcatgtgtcattgatagaggtattattttgggaggagatttaaatatcgttaggcctcatgaatacctaaactcattattcattgcaatcacactttcaaatggttcacaacaaagagaattatctaaacgtgcacaaggtaaatcagttgttcatttacataattctgacttgaaggcggttaagttattttacccctcatacgaagaacaatccgccatcggttccctcttccgcaccctcgacgaccttctaactagccacaaagacaatgtcgccaactacaaatctctcaaggcgaccatgctctccaagatgtttcccaaagctggtcagactgttccggagattcgtttggatggatttgaaggtgagtgggaaataaataaactaaataaatatttagctgtttctaagcagaaaaatactcagctaaaatttgataaagaagatgttttatctgtatctggggagtttggaattatcaatcaaatacaatttcaaggacgatcttttgcaggtgcatctgtagagatgtattcgattgttgatacgggaaatattgtgtatacaaaaagtcctttaaaagctaatccgtatggagtcataaaaacaaattatggaattccagggatagtttcgactttgtatgctgtttatttacctaacgaaaatgtatttccgggatttgttgagagatattttgaaaatgatttaagattgaactcatatttaaaaccattagttaataaaggtgctaagaatgatatgaaggtttctgacgaaaatgcattgttaggagccgtcatttttcctcaattagaggaacaagtagctatttcagattattttacaaatcttgacaaatttattcaatcacacaaggataaaattactcagctagaaacactgaaaaagaaactcttacagaatatgtttatttaactgaaaggtgaattaactatgccagatacaacttttaaacgtgaaaagaaaacagatagaccagttattgcactttgctatgattttgataagactctatctccagatgatatgcaagctcagggttatatccaaacagtacaaccagaaggcagcgatatgattggtgatttctggagggagtcaaatggtcgtgctacagcaaataatatggataaaaaccttgcttatatgtataccatgaagaaaaaagcacgtggtcagattgtttttacaaaagaaaagttagctgagtacggttctcaggttgcactttttccaggagtagaggattggtttaaacgcataagagactatggagatgataaaggaatcattgtcgagcattatattatatcttcaggtttaaaagagatgatagaaggaacttcaattgcaaaagagtttaaagaactgtacgcaacttctttctattttgatgatgatggagttgctgtctggcctgctcaagtagtgaattatactaataagacacagtttctttttcgtatctcaaagggtgtccttgacgtgaatgatgaagcggttaatgattctttcgcacctgacgaaatcagagttccatttcgaaatatgatttatctgggtgacagcgacacagatattccttgtatgaaattggtgaattctcaaggtggttattctgttggggtttttaatccagatgaaaaagatgaactaaaagccaagaataaggtctataaaatgatgagagataatcgtatttcttattttgctcctgcagactattcagagggtagtgagcttgacgaactagtaaaattgattattgataaaactgtatacaatgaaaaactgtatgagaagaagtacaacaatcaaaaagaagctattgaacaagctaaaccaaaagaagagcaagaaaaattagatttaatcaactcattagaaagtagtggtagtttcaaaaatactcatgctatagttgagaagttatcaaagtatactagttggaaatatgaagaattggaagatctcttagagattgcgcaggaaaatacacaggtatggcatattttaaatgatccagatattaaaaagttttaccagtatctaattgaacaacttggtagcaatattgatgagttaattagagacaaagttgaaaatattcaacaaaaatttgaatcttaaattgtaaatgagaattgttaggtaggttatgacgaataatgttacgaaatacatacttatagataaataaaaatgaatgaatattttattcttaaacactaaaaaactcttacaaaatatgtttatctaaccttcaaaaaataaccttatcagcatccataagcacatcctttttcgaataatataggtgagcctctttgattctttcaaagggtgctccttagtatttaataacttaaaagtatttacttttaataactttagagttataatgaattcgaaaaggggttgctttgtgcacgatatttatttttataaggacaaacaggggaatcaaccggtcttggactacatgagggagctagctcgtcgcgataacaaggacagccggatcaaactcaacaagctcaacgactatatcgaacttttgagccggcatggaacccgtgctggtcaaccctacatcaagcatctggatgcggagatctgggagttgagacccttgcgggatcggattttattcgtggcttggctggatgggagctttgtcttactgcatccttttgtaaaaaatacgcaaaagacacccagacgagagatcgagaaagctaagcgggagttgcaagatttgaaggaaagagggctaagtgatgaagaatagtgccatcggcaacaattggaaagatgtgagagcagagcttttcaccaaggaagaaatcctggaaagtgatctgcgggtcgcgattatgacagagctgatcgaagctcggcatgaaaagggcattagccaaaagaaactagaagaactcagtggagtcagtcaaccggtcatcgctcggatggagacaggaaagaccagtcctcaattggacacggtcttgaaagtcttagccagtctgggcaagaccctcgctgtcgtcccactggaacaagaaaaggtctaaaagaaatcagaaagaattactatggaaacaacacaaacctcccagtcgctctaccaagccctgtggaactcagcggatgttctccgctctaagatggatgccaatgactataagtcctatctattggggatgatcttttacaagtacctctcagataagttgctcttcttcgtggcggagaccatggagaaagagacagagagtctggatgaagccttggcgctttaccgaacctactatgaggatccagactctcaagaggatctaatcaccgtcatcaccgatgagcttaactatgtcatcaagccagacttgacctttacggccttggtggaccgggtcaatgaaggaaccttccagctggaagatctagctcaaggcttccgagacatcgagcaaagtgatgacctctatgagaatctctttgaggacattgatctctactccaaaaagctaggggccactcctcaaaagcaaaaccagctagtggctgccgttatgaaagaattggcagtgctggacgtggcaggtcatgcgggtgatatgcttggagatgcctatgagtacttgatcggtcagtttgcgaccgactctggtaaaaaggcaggagagttctatacgccccagcctgtagccaagctcatgactcagattgcctttttagggcgtgaagacgagcagggctttaccctctacgatgccaccatgggatcgggctcgctcttgctcaatgccaagaagttttctcaccagcctcaaaccgtccaatactttggtcaggagctcaatacctctacctataacctggcccggatgaacatgatcctacacggggtcccggtggaaaaccagttcttgcacaatgccgatacgctggatgaagactggccgacccaggagccgaccaactttgatggggtccttatgaacccaccatactcagccaagtggtctgcaagctctggtttcctccaagatccacgcttctccccatttggcaagttggcgcctcagtccaaggcagacttcgcctttctcttgcacggttactatcacttgaaactagacaatggtgtgatggctatcgttcttcctcacggggtccttttccgtggcaatgcggaaggaaccattcgcaaggccttgctagaagaaggggccattgataccgtcatcggtcttcctgcaaatatcttcttcaataccagcatcccaacgacggtgatcattctcaaaaagaaccggaccaatcgggacgtctactttatcgatgcttctaaggaatttgacaagggcaagaaccagaacatcatgacggatgctcatatcgagaagatcctccaggcttataagagtagagaggacatggataagtttgcccatctggctagctttgaagagatcgtcgagaatgattacaacctcaatatcccgcgctacgtggatacctttgaggaagaagaagtagagccactgacagagatcgtggctaagattaaccaaaccaatgcgaccatcgagacccagacagtttctcttctagacatgctcagccagcttcatggaacgacaccagaagccgatgccgaactcaagaaatttgtccaagaatttaagggctagggtgtgaggagatggtagtaggtaaaggatattcttttcgctatttcccaaatttttttcgaatgatagaagtagagggaacttccctctattttttatcgaaaaggagcagggatgcagaaaagacatgcgcatgtatcgccgaccttggacatcatggccaagaagatctttagtttgccggaggtgacggcagcatttattcgggacattttggagctggatgtggcggacgctcagattgtggaaggaagtcagccccacagcatggcatatgaggaggatgacttgttctccactgcggtggatgtgagagccaagctccatgacgggaccgaggtgatcatcgagatccagattcgcaagcagcaatatttcttgaatcgcttccattactatttggccaatcagctggtggaaaatgtgcaaaaattgcgctagcaaggccagacacataagatgtatgaacagatggagcctgtatacgggattgcgattttggagaagtcgctcttactggacgaagaggctgccatcaataaatactggctgaccaatagccggtctggtaagcaacttaaggcttattataagaatgacaagcaccaaaatcttttgcaggttgcctttttagagctagacaagtataataaagatgataatctgacagatgcaggcagacagtggctggaattttttgggaatcttcccttcacaaaagctcccagtcaggccgttgcccacgcagattcattattagattcatctagctggaccaaggaggagaagaccatgatagacgagcgaattcgtattcaagaaaattatgatatgaccctggagacagcgattgatgaagcgcgcgaagaaggtttagagaaaggcctggaacaaggtcgtaaacagttggtatgcgagatgatctcgcgaggaatgacgcctgatctgatatcggagatgacgggtttgtcgctggaggagatcaaatctatgttagcgtaagatctagctggaccaaggaggagaagaccatgatagacgagcgaattcgtattcaagaaaattatgatatgaccctggagacggcgatagacgaagcgcgtgaagaaggcctggaacaaggtcgtaaacagttggtatgcgagatgatctcacgaggaatgacacctgatctgatatcggagatgacgggtttgtcgcttgaagagattgagattcttctttcttgagtcgttaaaagaggcggtgcctcttttctttttgaaaaaacttgaaaattttcccgtttttttcaatccgcctttctagaattgtggtagaatagagtcaacaaagagctatcctcaccaacagtgtgatcgatactagaaaagaggattctgatgacaagaaaaattggtattattggtttggggcatgtgggtgcgaccttggcccacagcatgattttgaaacacacctgtgatcacttggtcttgattgataccaatgagaaaaaggtcaaggcagatgccttggatttctgtgatacggttgccaatacggggtatccggtgcatatcacggtcaatgactacgcggctttaaaagatgcagatgtcgtagtgtcgactcttggaaatatcgagttgcaggctaataacactgatgaccgttttgcggagcttccctttaccagtaagcaagtggtgcaagtagcgcgtgatttgaaggcttctggttttagtggggtcttattggtagtgaccaatccggtcgatgccgtcactcaactctatcaacaatataccggccttccaaaagagcaggtgattgggacagggacgttactggatacagctcggatgaagcgtgcagtcgctgatcgtttgcaggtatctcctgccagtgtatcaggctacaaccttggtgagcatgggaattctcaatttgtcgcttggagtcaggttcgtgttaagggacatgctattaccgatctcttctctcaagaagagcttgacgccatcaactacgagtccttgcgcggtggccacacggttttctttggcaaattctataccaattttgggattgcagcagcagcccaacgcttggcagaagctgtgatcaatgatagccatgaggaaatgccagtgtctaactatcgtccagaatatggaacctatcttggctacccagcaattgtaggtcgaaaaggaattcttgaacgattggatttgcatttgacagaagaagaaaaagaaaaattgctccattcagctgaaactatcaaagaaaatacacgaaaaggattggagcatgcataaaagcaaagagagtgggacagaaatcggtaattcgttagaattcgatttcgtcgtcccacctccgcacagttgagtagggctgtaaaagctgatgaaatcagcgtagtagagcccactcaactactgcgtcttgctcgacaatccaaaaataattgagaggctaggacttttgtcccagcctctttttctgcaattttttcgaatggtataagtgaagggattccctacaagaaatcattggaggttgctatgaagaaacgacacgagtatgtatcgcccaccttggatttaatggcaaaaaagatttttagtctgccggatgtgacggccaaattcatccgagaagtattggatctgccagtagagtccgttgagattttagaaggagaccagatccatgagcaggggtttttaggagatcttccttttgaaacatccgttgatgtgagagcaaggctagatagtgggcttgaagtgatcattgagattcaagttttgaagcaagagtatttcttgaatcgtttccactattatttagccaatcaactggtagaaaatgtccaacgcaagcgaaagaaaggagcgacccattctatgtaccaggagctggagccggtctatgggatcgctatcctggagcgaagtatttttcctcatatagattcacccgtcaatgtctatgaaatgcgccatacagtagatgggacacctctttatagctctcgcaaggatggagtagcgcacaatatgttaaaggttgcctttttagagttggataagtataatgaaagtagagatacggagttgaatgctcactggagacaatggcttgaattttttggcaatcgcccattcagtcatcaaccagatcaagtgatcgagcaggcagaatcactcctgatcccatcaaattggacaagggaggaaaaagaaatgattgatgaacggattcgtatcagagaaaattgggaaatgagcatggatacctttcggaaagaacaactggaagccggttttcagaaagggttgaaaaaaggtcttgaacagggactcgaacaaggtctcgaacaaggtcttgaacagggactcgaacaaggtcttgaacaggggctcgagcgtggtctcgaacagggattggaacaaggcagacaagaaggcatggagttgggagttcaagctggtcagcagtctctgattcaaaaactatctttgaaggggatgagtatcgagatgattgctgaaatgacagatttatccagcgaatccatcaaaaaaatgttggctacggattcgtctaacgaggagtagtagcgagaacagaattttgggaacaatgaaacttcgagaattaccttgctgataaaaaagcagttttaaaatggattgtaaagatctctggggttcgtttttcttggatgttgatcctctacagatttatacggttatgatttattgaaggttggacacttttgtccaacctttttttctcactcctcttggccctcccttagcgaaatgaaataaaagtttaaaaaatccaagttgtaatccttgacattacattatgatcctgtataatagctattgtaacaaatgatcttacaacagaaagaggaaacaactatgaaaaacattttatttatcgtcggttcccttcgtcaaggatcttttaaccaccaaatggctaagaaagcagaaagtcttctggaaggaaaagcaacggtgacttacttggactacaaggacattccaatgatgaaccaagatttggaaacaccaactctgcctgctgtgcaggcagcgcgtgatgcggttcttgctgcggatgccatctggatcttctcgccagtctataactttgctattccaggtgtagtgaaaaacctaatcgactggcttagccgtgcccttgacctgtcagaaactcgtggtccatctgcccttcaagataagatcgtaacggtttcttcagtagccaatgccggacacgaaccaatgtttgcggcttaccaagcgctcttgcctttcgttcggactcaagtggttggagagttcactggaacaactgttaacccagaagcttggggaacaggtgaattgctcttgacagatgaagcggtcgcagggctggaaaaacaagcacaagccttattagaagcataagaaaagctgagacagaagtctcagctttttagatactaaagagttgtccgaagaagtaagtcacacccatggtgagaaggccaatgatgaggttgcgaagcatagcttgcttggttggtgcttttcccagtttcgcactggtatagccagtgaagatcaaggatagtccaacaacgaagaccgtcaccggaatgcgataggcagctggaaagaggatgatagagagcattggaggaagggaaccaaccgaaaaagcaaggaagctagatgcagcagcatgccaaggattggtaaactcctcatattcgataccatatttctcttcgactagggctttgaggggatgtttcagaaaggcccgttctgtcaaaatctttgcggaagtttcgcattctccattttgaagataagcgtggtagagagattctctagctaactttggatcgcgatccaacaaggcttgttcgcggttaacagcggcttcttccgtgtctttttgagtggaaactgagacatattcaccgcccgccatcgaaaaggcacctgccagaatcgctgataagccagaaaggaaaatgatccagatgtttgaggtggcactggctaccccaatcaccaccccagcaatagaaataatcccatcattggccccgagaacagcggctctcaagatattcaatcggtcgttaaatgattcatctactccatgtttcatttcagtcatacaatgtctcctttgtcttgtttagaatgattataaataaaacacaaaaagaaagcaaggattttaactcaaatgataaaagttcgacaatttaatgaaatttaagttataatctttggcattgcaagcaaaaagaaagaataggtcatacacctattctagcaagatttatttagcagaagtgactttacctttgaggatcctgatggcattgtcacacgggtcagaaaaggataacaaaaaaacagcaaattgctgttttctgatgagaaaaattaattcgtatcttgttctttcccaacaacccaaaataagagaaggagttggaagatgcccaaggcaaataagaccataaaaccgttgcgacttcctttagcagtggcttgagtaaagtccatcttttgattagcttggctcatggcaacaatcagcgaagccagtgttgttccgacagcacctgcaaattgttgcagggtgttaaagatcgcgttcgcatcaggttgctcttccagagagagttgtttttgtccgttggtcataatattgccaaaggccagtcccataccggtcatgaagatcatgtaaaagatgagaatcaagccatttgtcagtttcagtccaaagagggtaaagtggaaatgggccagaagaattaaagtagctccaaggagaatcggtttgcgggcacccaacttatctagaatgagaccagagaagggagcaaaaccagccccaatgatggctcctggaagcagcatcaaggctgcaagcgtggtactcgagtggttgaccaattggacataattgggcaagaggaaactcatggccagagaacctaattggaaggtgaaaaaggcaagaacatggccagtgaggagatggttctttaagatggcaaggttgataatgggagtctctaactgattggaccgccagaccaagagaaccagtcccaagaacccaatcaccagccaatcaaggacagaaaaactaaagaaagcatggtcagagagaccgtgaatgcctagaatcaaccctaagaaaagggcaatgatagcaaggagactcatgatatcaagggtttctcgtttgactgtactgatttgttcaatggagcgaagtcctgcaactagcgaagctagaaggatcgggaattgaaccaaaaagatggaccgccaaccgaagttagccgtcaagagaccaccgatagtaggcccaatggctggtgcaatggctgtaattagggtacccactcccatcatgagaccgatcttgcgttttgggacctgctctaaaatgatattaaacattagaggaagggcaaaaccaacccccattccttggaccaatcgtcccaggaccacaaagccaaaacttggagcaaggaagtcgataagaacacctaaaacagagagaagatttccaactaaaaagatggacttcattttgaaggagcgtttgaggtaggcagataaggggactacacaggcaaccactagaagatagatggtggtgacccactgaacggttgcggtattgatttcaaattccttcatcaatattgggaaggtgatattcatggcagtttctccagccaccccgcaaaaggaaaggatccctgttgcaaaaatagcatacaggaccttggctgaaattttttcttgtgacatcggtgtctgattcctcctaaatcttcctaaagatatggactatggtataaaatcggatgaaaatccatggaaacgatttgattttccgtcagcttcaatcgctaggagcatagcagggctgacgttaacatgattcatcgttttgttagctaacaaatagtatagaggaaatgaagacccctgtcaaagagtttttgaaaagttttgaaaattttaacagcattctcaactgatgacgtctctacaaacgaaaggaaacgctcgccagtatggtataataagaagaaagtaagcaacgtgaataagtcaatcaactcgaacaggaggccccatgaccaagtatttagtccagaagtttttctggttacgagaaaaaagtttgattcaaatttcccagaagaccctggtttccttatttccttttttcctattttcagggatcattcgggtgatcgctctatcagtcttttccgatcgaggctatatccatcagctcttttcaatggatagttggttgccatgggatcaggccatcagccaggtccttaatcatttttccaactttctaggaggtctagctgggcctttagcgacctacttcgctggaaaatacacagctgggcactacggtagaagtacagggacagcaggtgtcaccgctcttttggtcagcttgattgtagggtcacaggaattgttgatgggaccactccatgatgggcaactgacacgcatcaacttacctgcgacgaccaatatcctcttagccattgttttaggctatctaatcgggcaaatctttcgtctatccaaggctagtgacgaccagattgtggacaaggatttcatctatcagcccaagacggtgcgtcccattttcttgtccttactccttgggattagcctcaatcttcttctccttctggggaatcagtaccgtgtttttcaaacgatcggtcagttctttagttctctcactgttagcagtcatcatctgctgtccacctttgtcatgggactctttagtggactatctgcttggtttggtaatagtcaagcctttgccttgaactcaattgcggatgataactttgctttggaaaatctcacctacgctgtgacgcatcatacaacgacaggtattccttatccctataccttgaccaatttgtatcggagttttggtctggtggcaggtgttggagctgtcctatcgcttttggtggcgatcttgctggtttcacgaagtcaaaaggacaagaaagttagtctcctcagcatttttccaagtctctttaacaatggggcttcattcatggtagggataccggtccttctcaatctactttatgtgattcctttcttattgatccctttggcgaatatggcgatagcagctgtagctttgtgcttcaaactgatgccggcagctgtctatccagtgccagacgggactcctagccttctctatgcctttattgggacaggaggaagtctgagggctttagctgtaagtatactttgttttgctgtcgatatcctcctctatctaccatttgtccgtatgggaaatcgtattcgaaaagatttaaaagtgaaaggagaaagcgatgaagcaatctaaaaaaatagcgatcgtccttactttggttagtcttttcttgatcgctttagccattccttcttatagctggactcggaccaatgtttcaagaatcgagaaattttataattcaaaattgtctcccatcatcatgatcccgggaagctctgcgacagagaaccgctttgatggcttggtgaccaagctcaaccaagaccgccaaggaaccaaacacagtctacttaaggttaaggtttggaatgatgggcatatcacctatagtggtagtattgatgccaaggacaatgagccggtaattgtggttggttttgaaaataacaaagatggctatagcaatattaaaaagcaagccaaactctttaatcaagccttcgaagctcttcaagaaaaatacaattttaataattttaagggtttaggtcattccaacggtggcttgatttatacagcctttattgaaaattatctaggggattatgatgtggatctcaagacccttatgaccatcggaactccctacaatttcacggagaccaatatcaaaaataaatctgagatgttggcagattttatcaagggaaaagaagccatccccacaacccttcatatgtattcagtagcagggaccattacctatgattcagatgagttggtcccagacgccagtgtttccgctgggaaatatatctatcaaaaccaagcagctagctatacggagattacggtgacgggggaagatgctcagcactcggaccttccaaccaatgatgaggtggttgccttggtgaaagagcatattgaaagtcaaacggatcgtcgaaccaaaccaaataaagaaaactaagtgtgatgaagggatttcttcctcacgctttttttagtataataaagtttagtatgaaaataggggagagtaaaggagatcagatgaaaagaaaacaatggatgcaattgggcttagtggcttcaagtacgctcttgttaacaggatgttaccagagataccagcgccagtccggtcctaaaaaagaggctacaacgatccagacttcagctaagaaacaagcgaaaaaagcagataacaaacaattataccagtctgttttttcagactaccaaaagatttttgccacttcaaaagatttagatgctatttccaaattgaatgatgcattagccaaagaagatcggatgatcaatagctgggtgatcgagactgtgatcaatcagccagaagccgttcgttatgcctttaaggatttaaataacgatggggtagatgagatgatcgtcgccaatcagcagaccgatggaagctactttgtgacaggagtttattacctcaaggaccaaaagccgactcttctagccgaaggtttcgtcgctggacacggtggagcgcgcaatgcaacgaccctctatcagggaggagaagtcttagaagtcagctggatgtcaggaactggccgtggtgtagctgtgctctcacggatagaaaaggcgccccaagccgcgaccaaagtccaggaagaagaagtgcaagttccgggggcagatctgaatgccctctttggaaaatcggatgaggataaactggatctcaaggcttttgactggcaaacttttgacagcacaccatcagcgggaaatagccaaagccaggaaaaaacgccttggaatgctgaaaaatcagcaaaattagcagaatttatgaagagctggggcgaaaagatgggccaacccaactatcaaaaaggcatcgctggcggtgatgttggaccagataacctctatactctaggggaaaatagtaagatggatgccatttatacagatactggtcagggaaatgcaaaataccgcatcgtggaacgctatagcaattgggacaagtatccagatgtgcatagttatttctttgccattacagatacaggagaaggtattgtctttcattctccaacgaccaatggtggaaagatgtatctaaaaccaacggacaacaaggaacttcaagaagagttcaatcaattacttcatcaatgaaaaaaagaaacaggagtgaaatcttgtttcatgcattttgtgcacttttgcagttaaaaggcaaataaatacgttagaaacttactttaatacctcgatgcagttctttaaccgatcaactacgggcttattcagttatttcaatcattcattaaagattggacgttttgtctaatcttttattttattcgcggaatgaataaaaatatattctctggtttttgtgaataggacggaaaaatatgttaagagttagtgataaaagccggtataaaaaggattgagtacataaaatatttgacaataaaaagatttcattttaaaatataattaatcaatatctataggagaaaaaattatgaaaaaacttcttacagcgggcgtggctctcttatcagttgcaacgttagcagcatgttctggtaaaactgcttcggaatcatctagcaaagatgcaaaggcttcttctagtaaggtagaaaaatcatctacttcagaaagcaaatcaagcagttcatcaaaatcatctaaatcagcaacttcttcaacaaatatccctgaaattgtattgttgacagatgaagaaattgacagtgcaaaaacaatcggagatatgaagaatctttatagcaaattagttgaaagctataagaaatatgcgcaagatattggccaacaaattccagaggctcagagagatgcgtatactcaacaagtagatccagctattaaggccttggatgaatcaaaaactcaatttgatacgatgctttcaagcgtaggtcctgatagtacgactgttcctgaacaaggacgtacgactttcttacaacaagtgaaaacatctcgtgatgcaatgaaacaagctcttgaaagtgcatataaaatggttgcaccgtatacatcggctcagtaatgaaagaataaaaaagagagtgggacagaaatcggtaattcgttagaattcgatttcgtcgtcccacctccgcacagttgagtagggctgtaaaagctgatgaaatcagcgtagtagagcccactcaaccactgcgtcttgctcgacaatccaaaaacaattaagaggctaggacttttgtcctagcctgtttttttgctttcttacaaaaatgtaagaaataaagggtaaaatgtaaggttatgttatggtgaaaacgcttcagttttagtacaatagacttgtaaaaaacgattgaagctttttcgagctagaaaggaatggaccatgaccctactagacgttcaacatatcaaaaaaatctacaaaacccgctttcaaggaacgcaggtcgaagccttaaaggatatccattttactgttgagaagggcgagtacgtggccatcatgggggaatcaggatccgggaaatccaccctcctcaatatcctagccatgctggaccagccgacggaagggcgggtatacctcaatggcacggatacctccaccatcaagaacaaggacgcttcgagcttccgtcgcgaaaaacttggttttgtctttcaagatttcaacctgcttgataccttgtctgtcaaagacaatatcctcttacctctggtcctttctcgcagaccagtcaaggaaatgatgagcaaggtggatagcgtgagtcgagagttgggcattcaccagctcttagaaaaatacccttacgaaatctctggtgggcaaaagcaacgggtagccgtagcgcgtgctattatcacctcacctgaaatcctccttgcggatgagccaacaggggcgctggattccaagtcttcagctgcgttactagatgtctttgaagatatcaatagcatgggccaaaccattctcatggtgacccactcaaccgcagcagcagctcgggccaagcgcgtgctctttatcaaggatgggatcctttataaccagatcttccgcggagaaaagacagagcgtcagatgttccaagaaatctcagataccctgacagtcatggcgggtaaggaggatcatgatgtttaaattaacaagtaaattagctctttccaacctcaaacaaaatcgcaagctctattatccctttgccttggctgttattttaacgaccatgatcctttatagttttatcgccttggcaacgacccctcatttagaggattcttacggagggagaacggggagaacggttcttggttttggttgtttcgtcgtccagctggtcgtcatcattttagtggcttatgccaatggttatgtcatgaaaaatcgttccaaagaactgggactctacagtgttttgggaatggagaagaagcacctcctcgtcatgaccttatgggaattgcttatcttctatattctcacagttggcgcgggactgggtttggggctcttatttgatcccttgatttttgccctgctcttaaaatgtatggggcttccagtcgtcattcaatcaaccttccagataggggctgttcttaacactttacttgggttagccttagcttttggcctcattcttttgttgaattctttccgcctcttgcgctacagttcccttcatcttatgcagcaaaagaaagcaggagagaagaagggaagattcttgctggtccaaactcttttaggtctagggctcttaggaattgctttctatttggcgctaacagcggagcgtccggttgcggctgtccaaggattctttattgctgtcattttggtcattcttgcgacttatcttttattcaacgcaggctccattaccttcttaagatttctcaaaggtcggaaatcctactattacaagccagagaattttatatccgtctctaacttaatagctcggatgcgaaaaaatgcagcgggtcttgcgacgattagtattctatccaccatggttttggtcaccttaacaggatcgcttaatatctttgttggagggaagaactacctagatactgtttacccttctgattacatgattagtgtggggcatatgccttcagatgctgaaacagaaccggttatcaaggatgttcaagctattattcagaaaacagccgatgcgacacatctgtcagattatcaggtggcacagacaacatactggtcggctgaaattcgaaagattgatggaagggtcttagaggtgaatgatcagtccactccatcaactggtcaggagttaaagtcagaaggaacagtctacttttttgatcaggcgacttatgagcaactgaccggtcaaaaagttgtgcttggggaaaatgaaatcctagcctatggttatcagtatccgggaagactagactcgaaattagaaatcaatgggaagaccttcacgattaaacaaaaattagattccaattttatccaaggaaaaatcccccaaatcgccctgtttcaacatcaaatgggcttgcaccttgtcctccctgacttgaaccaactgggactaaaagttgataaaaatttggaattttctattaacgcaaaagataaagataaccaagattttatctctggtttgatcaaagagctgtattcgacagacaaaatgagtcaatatggtgcgactctttttggtggatatgaacgatacagcatagagaaagagtggcgtgaatcagcagggactctcctctttatcgggattttcctatcggtcatctttctattagctacggttctcgtcatttactacaagcagatttcagagggctatgaagatcgggaaaattttgtgatcttgcaacaagtaggattggaccaaaagcaaacgtccaccaccattcgcaaacagattctcaccgtctttttccttcctctattcttctccttcctgtacctaggagtagcctacaagatgattgcaaagatcgttgccatcttaggagcgaccaatgctggattggttcttcaaacaaccttagctatctgcgctgtcttcttcatctcttatgtactcgtctttcttctgacttctagaagttatcggaagattgtcgtgagatagcattcgagtctataaaagattagaaataagatgaaacatacaacattttgttagcacaaaaaacaccgaggattttatccccggtgttttctttcgtgattatttcacgtgttttgcaagttcttcttgcgcttttttgtttgattcttctttttctttcaaccaattcttataagctttttcgtagtcagcagttgtgactgtcttgtcttgaactttttggtatttatagaagtttgaatctcccttgataccgattgaagaacgagcgcctgagaatggtgttaccttcgtgatagatggaaccccacccttagagtagattggaagaaccattgcattttctgttaaccaagcttgggcagcagcgtatttttcataacgtgcattggtatccaatttttcagcattagcagcatctaacaattctttgtactcgttcaaaccgattttttcgataagagcttggtctttcttaggatcaagtcccataccagtcaaggttgaaccatctgttgggtttaagatatccaagtaagttgatgggtcttggaagtcaggtccccaaccagtgatatccatatcaaagtctttttgctctggtgattgggcaaagtaagtagcgttatctgcatcgtctgtagacaacttttgaacatcgatcacgacattgtctttaccaagagcagattcgatagagctcttcatagagtctgcttgttggacaagtgagctagaagattggtctacgacatagtcgatatggattgggaattgaaccccttgtgattgcaattcagattttgcttttgcaagttctgctttggctttatccgcattgtgcaagctatcttgagcatcagcaaagctaacacctttccactcatctcctgttgcggcaagtttttcttcaacgagagtaccgaagtcttttccgttcgcttgcacaaatgtaggtggaactagtagggtacgaagggttttagttgctccatctttaccgtttgattgagcactatatgaggttctatccaaagcaaagttcaaggcttgacggaagttcttgttttgaagagctgtcttggtgctgttcttttgctcatcagtcgtcttcttagtatgaccgtagttttgacggttgacgttgaagtaagcatagtagacaaccgcatcttgtggcgaataaacgatgttatccttgaatctcttttgaatcgtagtgtaagttgaactcgttgggaagagacgggcagaagttaagttaccgtctgagaagttacgagcaagatagtcttggtctgatccatcgaagtaagtcaatttaaccgtatcgatgtgaacatttttcttgtcgtagtattcagggtttttatccaactcgatttgtgattttgaagtgaaggatttcaaaatgtatggaccgttgtagaggataccacttggttttacgctaccaaagtctttaccagctgattccaagaatttttcattgactggcatcatagtagcagtggtcaatttagaattccagaaagattctggttggttcaaagtatattgaagagtgtgatcatcaacagcttttaccccaacggttgagaagtctttagttttcccgtttacatagtcatccaagcctttgactgagttttgaaccaagtaaagagcatcagattttttatctgctacgtattttagagatgtcacgaaatcttttgcagtgacgtcagcgtattcatttccttctgaatcataccacttcgcatcttttcgaagcttgtaagtataagtcagaccgtcttttgagacggaccagtcttctgcaagagcaggaactaagttaccgtattggtcgttttcaaacaaaccatcgaccaagttggtagtaatgtcgcttgtagttgcacggtttgaagtcaaatagttcaaggtatcagggtcagaactatagacatatttataagtcgtaccttttgacgcattagaagatgagccacatgcagcaaggaaaagcgttgaagccgcggcgacacctgctaaaagagcaagcttcgattttttcatattcgtgtctccttttgaataattttaatcattatactccaatcaatcaacaaaataaagtgttttttgaactttttttgtatatttacacacaggtatacagtaaaacccttgattttaagggatttttaaggaataaaaattttttaaaaaaattactattatgctttacatactagttgagaaagagtatactgatagtgaagaagctagtatgtaaaacaaactagcggaatatgtgatgaaagaggtaagaaggatgaaagagtcccaattactaaagggagtcttggagggctgtgtgctggagattatttctaaaaaggctatctatggctatgaattgatccaaagtctcaaagagatgggatttgataagattgtcgctgggactatttatcccctgcttcaaaaattagaaaaacaaggggttattcatggggaaatgaggccgtctccagatggccctgatcgtaagtatttttcactcagtgatgctggaagagagcgcttagaggaattttgggaccagtggcaggagctggtcacaaaagtagaacgtatcaagaaggagggagaagaatggtagaaagttatacagaaaaaatgtcagatgaattgattcatctaaacagagaggatcaagcctatgtgaaaaaaatggtggcctatattggggccaagtcctatttttatgatgatgaagcgctcggtgaacaactctacaatatggtttgcgacctgaaagttgctgaaaaagaaggcattcgggcggtggattattttggaaaggatccgcgggtgatggtggatcaagttctttcagacttgcctaaacgctctttaggatcttatgcgggactcgtcttcctacttggagtgatcttagttggcatgcgttatttaatggattttacctggatgacaccactgaaaatcgaacccttgacctatgttgtcattctactcaatttcttggtgttcagccagttcatcacgtggctttggtccaaacagagctacggtgaaatgaagtggtcttgggctatgtttatcagtgtgatcagcctgatggtatttctgaacatcgtacgactattttcgatctattttggccacattgggagtctcttcttatcagatggttgggcgattgttctcgctgtcctagtcttacttgggtttacggtcatggcttttagaagcaggaatcgtctgatgtcgagtctactagtcatgggcctgactttcctagttacaggatgctggattcgtcttgtgaatcaggaaaccgctcatttaataggctggtcacttcctctcatgggactagtcctgacccttattgtattttgtctccaaagaaaggggggagaaagatgacatcagttatttattatgaagaaacgcaggctttggttcaaacctttagtcaggaggatcaagcctatttccaagacctctgggattatttcaatttcgccggtttcttatatgaggagaaggctttgagagagcaggcctataatttagcactagacttttcgcaagcaggagcggatggcttgacggcaaaggactattttggtctcgatccaaaggaaatggcagaccaaatcatcgaaaatatgcccaaagaatccacgcggtctgttctaaaatatggggcgatcatctcgggaattgtgattttctatcgcctcttaagtgattttgcttctcaagcggtccttgtgctcaagcctctagtctatttaaccgacatcattttgggactcctagcaattgggctactcttctatctccttcgtcgcctcatttttgcagaagaaaggtcaaagaaagcaaaccatgtggcagtcgttttcgttctaggagtctatttcgctagtgagatcgtgggggtccgtttcttaccagcacttgcttggttgacagtgccgaatccatgggatactctccttatgacaggggctagtggagctctcattctttggcaatggaaagaagagcttggcagagccttcgcctttcctatcgtcgcctttttagtggttggattcttacatcgctggaccttggcacaaggagttcagaatcttggtatgacagttcttctgcccacagtgatcatcatctttgggctggttatttattattggtttacgattcgtgctttgaaaaaggacaagccgaaaagtgataaatagaaagaaaagggggagaaagtgtctcccttttctcttccaagtatgatagaataaactcttagataggagaatagagatgaatttatttcgaaaaaagggacttgggcaagtacacccgggtctaaatcgccatttacgattgtgggatttgattattttaggaatcggtgccatggtggggacagggatcttcacgattacgggaactgcagcagcgaatttagctggtccagccttgatcatttcgattgtgattgcggctttttgcgtcggcttatctgccctcttctttgcagagtttgcgtctcgcatcccttcaaccggtggagcctatagttacctctatgccatctttggagagtttcccgcctggattgcaggttggttgaccgtgatggaatttatgacagccatatcaggggtggcttcaggttgggctgcttatttcaagggtttgttggccaatcttggctggagcctgccgacggctttaaacgggacttttgatccagctaagggaacttatgtggatctcttgcctattttggtcatggtcctcgtcactgccttagtccttatgaatgcaaaagcggtcttacgttttaattccttgctggtcttactcaagttttcagctcttgccttgtttattcttgttgggatttttcacctaaatcctggcaactgggcaaactttgccccttatggatttggcgaaatctatggtggtcaaacagggattatgtctggagcttcgctcatgttctttgcctttcttggttttgagtccatttccatggcggtcgatgaaatcaaggaaccacaaaagaacgttcctcgtggcattgtccttagtcttttgatcacaacggttctttatattttggttaccttagttttgacaggtatggttccttttaagaacttaaatgttgatgatgcagtagcctttgcccttcgtcgggtaggagccggctgggctgggaattatgtatcactggtcgctattttgaccctgattaccgtctgcatttcgatgacctttgccctttcacggatgatttacagtttggcgcgggatgggctcttgccaaaagctatgaaacagctcgattccaaaactaaaattccaaaaaatgcaacactagtcgctggatcgatggccgccattgctggtggagtctttccacttgctagtatcgcttccttcttaaatatttgtaccttggcttacctggttatgttggcctttgccctcttgaaattgcgcaaggaacacggggctcctggacctggtgaatttaaaacacccttggttccggtcttgccaatcctatcgattgtggtctgtctgtcctttatgacccagtattccctatcgacctggctggccttcggagttgctctcttgatcggggttggaatttatttcggttatgggtatcgccattcagaagaaaatcaataaaagatgaaagctagagtagtagaactctggctttttacatagagaaagctctttttttggtataataaagggagaaagttaactagataacaaaggagaacatcatgacatttgaagagattttaccaggcttaaaggctaagaaaaaatatgtacgtacaggttggggtggagctgagaactatgtgcagctttttgataccatcgagcaaaatggagtggctctggaagtgacgccttatttcctcattaacgtttctggtgaaggggaaggcttctctatgtggagtccaaccccttgtgatgtcttagcgacagattgggtggaagtccatgactaaaagggtcttgattacaggcgtgagttccgggattggtttggctcaagctcgactctttctagaaaagggctaccaggtttatggagtggaccagggagcggacccccagttagcaggtaatttccatttcttacaacgggacttaactcttgatttgacgccgatttttgactggtgtcctgaggtagaggtcttgtgtaatacggctggggtcttggatgattacaaaccgcttctggagcaaagcgctcaggagattcaggagatctttgagatcaactatgtgactccggtggagctgacgcggcattatctgactcaaatgttggagaataaaaaaggtatcatcatcaatatgtgctccattgcttctagcctggcaggaggaggcggtcacgcctatacctcgtccaaacatgccttagcgggctttaccaagcagttggccctggattatgcagaagctgggattcaggtctttggcatcgcgccaggagccgtcaaaacaggcatgaccgcagcagactttgaaccaggtggtttggctgactgggtagccagtgagacgcccatcaaacgctggatagaaccagaggaagtggcagaagttagcctctttttggctagcgggaaggcgtctgctatgcaagggcaaatcctgacgattgatggtggctggagtttgaagtaggaggatgaaaaagcaagagttgaaatcttgctaagaaatgtaattgttttttccttactgaaagaggatcaaacctaggtgaacaattaagttaggacagtggtgagacaggtatttccctctatgctaaagaagatcttactgaacgaaattaaacctaccagagtgatcaggatgaatcagatttctttatgattggtcacgatggagatctagcctttttcaccaaaaaaagacagggataataacaattatgaagataactgagggtaagttcagaagaactttttgaatgggctacctgaaaccttaagagattgttttagaagaaacgaatagtacaattgattaacttttagaaagagtggaatatggaaatcaaaaatcactttggtgtatacggagtctgtcttcaagacggaaaattgctttgcattgagaaaacgagaggaccttatcaacatcgttttgatttaccgggtggtagtcaggaagtaggggaggggctgacagaaactctcaagagagaagttctggaggagacaggctatacgcttagccagtattcaaatcctaggatgtatgatgtgctggttcaagaagagggcaaagatttcgctgtacaccatatcatggccttttatgacgtggtactcgatttcaaacgtcctcaaaaatcccttcctcatgaagttcttgatggaagcaatgattcagcaaaggcaatttggttaaatttggaagagattactgccgataatgcttcgcctttagtattaaaggtgaaggcagagttacgaggatttccagaattggacatgacaagctatagaaattggaaggtaaaagaaaagaaggagaacaaatgacacctcaagaaatgtggaatgcctacaagcaaatcaacccctctatcggagatgagatagatgcctgggcttttggagtggaaccagaccttttagcggaactggtgtttacaggcgaaaaaacagcaacagcctcagcttatgacctctacacagtagaggacgaaccccttccacaagaagggacctttgatgttgttttagacagtaaggatcaagctgtctgcattattgaaattacaaaggtttccgttcagcctttccatcaggtttcagccgaccatgcctataaggaaggtgagggagacaaatctttagcctattggcgtcaggttcatgaggaggttttcaccgagtggatgagcgaggccggactgacttttacccctgacagcaaggtggttttagaagaatttcgtaaggtttatccattatagatacgctctccttttaggagagtcattattgaagacaaaatcaatttgaaaactttccttaggtgagtacggacgtcagcgaacttcctcgaagttccatgactaattaagatacaaagagcgtctgcggatacagtcaaaataggaagtttgacgcagaatctttagattctaggagaacttatctttttgacacaatccgcagcccgtgttcaattagttttgagcctcttcgctccttaattgctgggctcaggctaaaacagtttcccaaactgttttactctcaaaactcccgagtgcttgaaatgattgtatttcaagcacttttctcacagcggaaagttttagtatatttttgattaattttttaaattaaaactattattactgatttgtagagtaacgttacttatcttactaaaaaatagtttgtctacattcgagctttccttataggagagttttttggtttgggtcttattttccaaaaggggtaaaaaatggtataatataagcgatattgtacagaaaagagaaatgttatgccaaattatgccattattttagcagcggggaaaggtacccgtatgaaatcagatctgcctaaggttcttcataaggttgcagggatctcaatgttggagcatgtcttccgtagtgttggagccatctcacctgagaagacggtaacggttgtgggccacaaggcggaattggtggagcaagtcctagctggacaaacagagtttgttaaacagaccgaacaattgggaactggtcatgcggtaatgatggcagagccagtcttggaaggtcttgaagggcatactcttgtcatcgcaggtgatactcctttgattacgggtggaagcctcaaacacttgatcgactttcatatcaaccacaaaaatgtggcaaccattttgacagcagaagcagccaatccatttggctatggtcggattgtccgtaatgacaatgcggaagtgcttcgaattgttgagcaaaaagatgcgacagattttgaaaaacaaattaaagaaatcaatacaggaacttatgtctttgacaatgcgcgcctctttgaagcgttgaaaaatatcaacacaaacaatgcccaaggagaatactacatcacggatgtcatcggtattttccgtgaagctggtgaaaaagttggggcctatacgctcaaagattttgatgaaagtctcggggttaacgaccgcgtggccctctcaacagcagaaggcatcatgcgtcgtcgcattaaccaagcccacatggtcaatggagtgagcttcgttaatccagatgcggcctatatcgatgtcgatgttgagatcgcaccagaagtgcaaatcgaagccaatgttaccctaaaagggcacacaaaagttggggctgaaaccgtcttaaccaatggaacctatattgtggatagtgaaattggggcaggtgccgttattaccaactccatgattgaagagagcacggtagctgatggcgtgacggtaggaccatatgctcatattcgcccaggttctagcctcgccaaagatgtccatattggaaactttgttgaagtcaaaggttcgtctattggcgaaaataccaaagcgggtcatttgacctatattggcaactgccaagtcggcagcaacgtcaactttggtgcaggaaccatcacagtgaattatgatggccaacacaagtttaaaacaacgattggaaacaatgtctttgtcggatccaattcgacgatcattgcgccagttgaattaggcgacaattccttagtcggtgctggatcaaccattaccaaggatgtaccagctgatgcgattgcgattggtcgtggccgtcaagtgaataaagaagagtatgcccttcgcttgccacaccatcctaaaaataaataggagattctcatgcaatttgaagaaaaaaccattgagcgcaaggagatttatcagggaccgattttccaagtggtcactgatcaagtagaactccccgctggaaaaggccaagcgcagcgtgatttaatcttccataacggagcagtagcggttttgccgatcacagaagatgggaaaacgatcttggtcaagcagtaccgcaaggcgattgaaagaacctcggtggagattccagcagggaagttagaaaagggagaaaatgcagatcctaaagtggctgctctgcgcgaattggaagaagaaattggctacacagcggacctagagttattgtatgatttttattcagccattggattttgtaatgagcggatcaaactttatggtgcgtccaacttgaaaaaggttgaaaatccacgtccacaagatgcggatgagaccttagagttattagaagtaaccttgaaggaagcgaaagatttgatcctgtctggtgaaatctgtgatgccaagaccatcatggctatccaatattgggacttaatcaataaatagaggaggatccgatgggaaaacctttattaaccgatgaaatgattgaacgagcgaggcgaggtgaggacatttcggatcctaaaatggtcgatgctgaagagacgaagattattcggacagaccacaggggatttggctatgaacgtcctatgagagagagtcgtatggagcatccacaagagcgttattctcaggatactgtgcagatccaagtggagcccacagtgaccaagagtcgtcgcattgaagaacgcaaacaaagtgtggtccaatccaaactcaataagattttgttctggatcattgtgctcctcattgccttgatcattgctatttggcgtctgtaaggtcgtcacaaggagagaaaagacatgaaaattggaattatcgcagccatgccccaggagttgaagatcttggttgaagcccttgaaaatggggaaaagcatctgcgtcttggaaaagtctactatacaggatcgattggtcgccatgaggtcgttttggttgaaagtggcatcggaaaagtcatgtctgctatgagtgtagcagtcttggccaatgatttcaaagtggaagccattatcaatactggatctgcaggagccgttgcaccgggaatggctgttggggatatcgtccttgccgacaaattggcctatcatgatgtggatgtgacagcatttggctataagtatggtcaaatggcaggtcaaccactttactttgaatccagtcgctattttgtatcagaaatgaaaaaagttctggaagaagaggctgcgaccacacatgtgggcttgattacaacaggagatagctttatcgcaagtgaagaaaaagtcgcagcgattcgggagcatttcccagaagtcttggcagttgagatggaaggggcagccgttgcccaagccgcacacgcagctggacgtcctttcatggtcattcgagctatgagtgatacggcagatcacgcagccaatatctcttttgatgaatttatcgtggaggctggcgaacgctctgctcaaaccttgattaccttcttaaagagattggtgtaaaataaacaatagagccaaggaatatcttatgatagaagtgggacgaataatgaagttcgattcaatttcatttccagtccctcttctttttttgaagctgatttttttagaaatagggtgctttcatgctataataaagtctagtaatgtaaaggagaaattatggttttatcaaagaaacgggcacgccatgtgattgaagaaattattgctctctttccagatgctaagccaagtttggattttcgcaaccattttgaattactagtagcagtcatgctctcagctcagacgacagacgcggctgttaacaaagcgacaccaggtttgtttgcggcttttccaaccccacaagctatggcagcagccagtgaagccgctatcgccaagcatatttctaaattaggcctctatcgaaataaggccaaatttctcaaaaaatgtgcccagcaattgctagataactttgatggtcaagtgcctcagactcgcgaagagttagaaagcctgacaggagtaggtcgcaagacagcaaatgtcgttatgagtgtaggatttggtattccagcctttgctgtcgatacccatgtggagcggatctgcaagcaccatgatattgtcaagaaatcagcgacgccattggaagttgaaaagcgggtcatggatgttctgccaaagagcgaatggctagctgcccatcaagccatgatttattttggacgggctatctgccatcctaaaaatcctgaatgtgaccagtacccacaactctatcattttgattaggaatcagttcctctgctcgttcgagcagaggttcttttttaggctgaacgtatatttattaaaaggattgaaagattcagttttgcaaatctgtggtggtaggtgcctagattcgcctatccagcttttttgagattgatttcaagatgctttttcttgacatcttattatattcattcagaaataacgaacttttttaaaataaatttggttttttaaaagaaatagtgtataatggtagaaaatctaacataaggagatagtgatgaaagcaaaaaaactgttagctcttgcaggagtttctgttgcaggtgcctttctcttagcagcgtgtggtggtggtagtagcaatcaagcaacctactcattcgtctattcagcggatccaaataccttggattacatcgctgcaactcgtacaacaacttcagatgtcacaagtaaccttgtagatggtcttcttgaaaacgaccaatacggaaactttgtgccaagtctagcagaagattggactgtctctgaagatggattaacctatacttacaaacttcgtaaggatgccaaatggtatacgagtgaaggagaagaatatggtgctgtaacggctcaagactttgttacagggatcaaacacgcggttgagtctaaatcagaaggtctcttcttgattcaaaattcgatcaaaggtttggatgcctatgtaaaaggggaaaccaaagactttaacacagttggagtcaaagccttagacgaccacaccatccaatatactttggtccgtccagaaagcttctggaactcaaaaacaacctcaggtgttcttttcccagtcaatgcggatttcttgaaatctcaaggaaaagattttggttctttgaaacctagcagcatcttatacaatggtccatattacttgaaatcattgacttcaaaatctgagattgaattggtcaagaacaaagactattacgatgcgaaaaatgttcatatcgataatgtcaaattgacctttaacgatggatcaaacccagattctatcattaaaaactttgaaaaaggtcagtattcctttgcatctgttatgccaaatagctcgacttacaagagcgttaagaaaaactttggcgacaacattgtctacggtttacaattaggaacatcctactatcttggattcaacttggaccgtcaaaagtatgaccacactgccaaaacaacggatgaacaaaaagcttctaccaagaaagcaatcctgaacaaggacttccgtcaagcggtaaactttgcatttgaccgtaaatcttatgcagcacaagtatccggggctgatgcggctgaaaatacccttcgtagtaccttggtgccaccaacctatgtccaaatcaatggagaagattttggtaaagtcgttgaaaaacaattggttacttatggagaccaatggaagggtgtgaatctggacgatggtcaaacaagcctttacagcccagaaaaagccaaggcttcatttgcgaaagctaaagctgaattgcaaaaacaaggagttcaattcccaattcatttggactatattgtcagccaagtggacaacagcatggtccaacaagctagctccttcaaacaatctgtagagtcagcgcttggtgcagacaatgtcgttgtggaccttcaaaaggtttcagatgatgatttccaaaatatcacctatttcagtgatacagcagctgcgagagattacgatatctcaggcggtggttgggcccctgactaccaagatccatccacttatctcgaaagtatcagcccagtcaatggttcagtttcatactattttggtatagatgcgggaacaaacaacccagccattgcagcagttggtttggaccaatacgccaacatgttaaaagatgcggatgctgaattgttggatcaagcaaaacgctacgaaaaatatgcagcagcgcaagcatggttgacagatagttcgattacacttccaactgtttcaaatggtggttcaccaatgcttcaacggaccgtgccatacagccgtgctgcttcatgggttggtacaaaaggaacaggaacattctacaaataccttgaaatgtctaaagatgttgtcacaacaaaagactttaacaaggccaaagaagaatggttgaagaaaaaagcagaatccaataaaaaagctcaagaagatctcaaagatcacattgagaagaaaaaataaaaaaatcaatcattggtctatcaatgaagataaaaaagtcggagccgtcatgtaagggctccggtttttttatgtcttgaaagtcagtctgtctcattctattcactaaatcttaaaaaatagccatctggatccagaactgcaaattcatgaggatagatataatgatcaccaacacgaaattttcttttaattaatgggcgataaataggatagttggattctaacaacttctgatagagtttaggaacatcctctattccaaaggagatgttaattccttggccaaatgggtaggcaagttcagttagttcattatctgtcccctcctctatcattagctggcaatcttcgagagaaaggaaaaggaagttctcttctggtcgcccgtattcgatggtaaaacccagtaaatcacagtagaaggaacgggactgctctatattcgatacaataaactcaggaatcactgcattgaaattcataaagaccatccttacaaatcaatttctaatacaattggtgtatgatcttgacgagcgcctgagtcaatcatatctgatttagtgaccttgtcagcaatgcggtttgaggtcaaccaatagtcgattctccagcctgtgttgttgatttttgatgtcttgctacgttgtgcccaccaagtgtagcgttctgggacatcaccatggacatggcggaaggtatctgtaaatcctttggccaaaagatttgtaaatccttcacgttcttcgtctgtgaaacctggtgaacggcggttgctggcagggttggcgaggtcgatttccttgtgagcgacattgtagtcacctgtagcaagaacaggcttttgcttgtctagttcagtcaagtattccgcatatttgacatcccagacttgacgttcttccaaacgtttgagtccatcaccagcgttaggtgtgtatacctgtgtaacgaaaaatttatcaaattccaaggtaatgatccgaccttccaagtccatggtcgaaggggctccgatctctgggaaagtcacaactggagtaagctcttttttatagaggaacatggttccagcgtagcctttgcgagctggctcttgagaagagcgccaagtgttttcatattgagggaagagctcctcaaggatttcgaggtgttttttagtaggacctttggcggataacttggtttcttgaatggcaatgatatccgcatcctcagcaaccaaggtttggaggacttcttgagagagtttggcgcgtgctgaatcactagttaatgcagcattaagcgagtcgatattccatgaaatgagtttcattgtatttccttttcttgacatgatagattactttattataacaaaaaatatatttttttctgattagaatgccttgaattctctcctgaaatacattataatagcttgaattcatttggagaaagggagttcattatgaaattttactcttatgattatgtattgagtcagatcagtcagcaaaattgggtgaccattgggatctctggtttgctcattctactgactggtttttttgcggtgaaagcctatcgggataagcacgatagcaaattccgtgaattatccattatctcgattttgactctggttgcagtggtcttgatcggcatcagcagtttccaaaatagccaaagtaataatgaccaatttcaacgttctctgcattttattgaggtcatctcaaaggagttggatgtcaaaaaagaagacgtctatgtcaatacttcagcagccacagatggggcgatcctgaaggttggagaggtttattaccgagctatcgcaggatctgacccagatagctacctattagaaaagatggatctgtataaaacagacgtggaacttgtggaggtgaacaaatgatagtaaattttttaaacatcttgattaaattagctttgggcttgatttccttggtatttgtcatcaatgtgaccgggaaaggaaacttagcaccaaattctgcagtagaccagatacagaactttgttcttgggggcattattggtggggtcatctacaatagctccattaccattcttcagtacattgtgattctcttaatgtggactattttgatcttgctcttaaaatggctcaataccaatgttcgttttatgaagcacttgattgatggaaaaccaactgtcatcattaaaaatgggaaactggatccggaagcgtgtcgttccaaaggactttctgcttcagatgttgctttgaaactacgtggacaagggatttttcaattaaaagatgtgaagcgcgctgttattgaacaaaatggtcaattaattgttgtccgtgcgggggatgaaaatcctaaatacccgattattacggatggcgtagttcagcttgaaattttggaaacaattggaaaaagtgaagagtggctgctggctgaattggaaaaagaaggctatgacaacgttttggatattttcattgccgagtacgacaaaggaaagatcaacgtggtgacctattagtagaagagattgggcgagcctgtccaatcttttttctttgtaaaattccaggaaaggcctcttcattttcttgagatactcttgaaaaaatagtaaaatgaaaggaaagtgtttattagaaaagaaggatagaaaatttcatgaagaaaaaaatacggaagtttgagaatcattcgataacacgcaggctatatctgctgtttagtttgatttgccttctttttttagttctgattgctcggcttggctatatgcagatcactcaccaatcctattatacggataaattggcaaaagctacgaaaaagacggtcaaacaagggagtgtgcgaggacaaatctatgatgcttctggcaagcccttggtggaaaatgtggggaaacaggttctgacatttacgcgggatcgtaaaatgacagcccaagaaatgcgagagactgcagggaaactcttacagtacgttgatgtagaggatcctcaagtgaccgaacggcaagaagtagactattatctagccaataccaaagtctatcaagaggtcgtggaacatctgcctgagaaaaagaaatatgatacagatggaaatcgtctgccggaagctaaaatctatcaagcggcagtggacagcattgatccttcgaaactcggttatactgatgatgagaaaaagatcatctatctttacagccagatgaatgctgtggagaattttgcgacgggaatcattacgacgaaagcgttaggtgctgagcagattgcgaccatcactgctgacagtcaagattttccgggaattgccatcacgactagctgggaccgcaaggttttggatactcctctagcctctattattgggaatgtctcaaccgagcaggcggggcttccagcagaagaggtcgaccagtatgtcaaaaaaggttacgcccttaatgaccgggttggaacgtcttatctcgaaaaggaatatgaagaggttctccaagggaaacgcagtgaaaaagaaattcttctggataaaaatggcaacatagaaaaagtgctcgacgtttcgaaaggggctaagggagaaaacctcaagctctcgattgatttggatttccaaaaaggggtggaggatattctccgctctgcctttagcgcagagttaaaagctggaaatgcgacctactccgaaggtgtctatgctgtagcactggagcctgatacagggaaagttcttgctatggcagggattaaacaccaagcagggagtcaagatctatcagcagatgctttgggaacagtcaccaacgtcttcgtcccaggatccgtggtcaaaggagcgaccttgacttcgggatgggaaaatggagtcatttctgggaatcaggtgctgaccgatcagccgattgtttttgcaggatcagctcctatcaattcttggtttacccaatacggtagtcgttccatcaatgcggtggaggctttggaatactcctctaatacctatatggtccaaattgcccttaagatgatggggcaaccctacactccaaacatgaccttacaagtggatcaagtagaccctgctatgaaaaaactccgttctacttttgcagagtatggtcttggaacgacaacggggattgaccttcccaatgaatcgactggttttatcccgaaagagtatacagtcggcaattatttgactaatgcctttggccagtttgacaactatacaccgatgcaattggcccagtatgtggcgacagttgcgaatgatgggaagagggtgagtcctcatgttgttgaaggtatctatgacaataatgatcaagggggccttggtcagttgaaaaaaacgatcgaaactaaagagctcaatcaggtgcatatctcagcggaggacatggctttgatcaagcaagggttctaccaagttgcaaatggtacgagtgggttaacgacaggaaagaccgtgggtcgaggtgctagtgtgcccattagtgcaaagaccggtacagctgaaaccacagtcgatggaggcaaacaagccattaataccaatgttgtggcttatgcaccatcaaacaatccaaagattgcggtagcagtggtttttccacataataccaatctacaagcgacggtcagtcattccattgcgcgtgacattattaatttatacaatcagaaacaccccatgaattagaaaggaaattatgctttatccagcacctattgcaaaattaattgacagctattcgaagttgccaggaattgggatcaaaacagcgactcgtctggctttttacacgattggtatgtcagatgatgatgtcaatgaatttgccaagaacttactgaatgccaagcgtgagctggggtattgcagtatttgtggcaatttaaccgatgaagaaacctgcgagatttgtcgagatgaaacgcgagatccatccctcattctggttgtagaagatagccgggatgtatctgctatggagaatatccaggaataccacggtcgttaccatgtcttgcatggcttaatctcgcccatgaatggcgtgggacccgatgatatcaatctcaagagtttgattagtcgcttgatggatggaacagtcacagaggtcattgttgcgaccaatgcgacggcagacggggaagcgacatctatgtatatctcgcgcgtgctcaagccagcagggatcaaagtgacacgtttggcacggggactggcagttggagccgatatcgagtatgcggacgaagtgaccttgcttcgcgcgattgaaaatcggacagaattataagagaagttctttcgaaagggctatcattgtggtatactatcaagtaagaaatcaagggaacaattagggagaaaatatgagtaaacaagacttaatcctgttgtatggtggacgtagtgcagaacgtgaagtttctgttctttcagcagaaagcgtgatgcgcgcgattgattaccaagcattttcggttcaaacctactttattacgcagtcaggagacttcatccagacgcaagcttttgaagagaaaccagcggatgatgagaaattgatgaccaatgatacagtggactggtctaaaaaagtggcaccatctgcgatttacaaggaaggagcagtggtctttccagttcttcatggaccaatgggagaagatggttccattcaaggcttcttagaagtcttgaagatgccttatgttggctgtggcatcctagcttccagtgttgcgatggacaagatcacgaccaaacgggtcttggagtctgcagggattccacaagttccttatgtagctgtagtggaaggcgatgacttggaagagaaaattgctgcaattgaagctaatctctcttatcctgtctttaccaaaccatccaatatgggctctagtgttgggatttcaaaatctgaaaaccaaacagaacttcggactgctcttgaattagcctttaaatacgatagccgtgtcttagtagagcaaggggttaatgcgcgtgagattgaagttggactgcttggaaactatgatgtgaagagcaccttgccaggtgaagttgtgaaagatgtggccttctatgattatgatgccaaatacatcgacaacaaaattaccatggcgattccagctcaattggatcctgaggttgtgaaaaccatgcggaccaacgcagaaaaagcctttcgtgcaatcggtggtctgggcttggcgcgttgtgatttcttctatacagataaaggagagatcttcttaaacgaactcaataccatgccaggatttacccaatggtctatgtatcctctgctttgggacaatatgggactcaactatacagatttgattaccaagttagtagagcttggaaaagaagtcttccaaaaacacgaagcgcatttgttgtaagaaaagagagagtgggacagaaatcggtaattcgttagaattcgatttcgtcgtcccacctccgcacagttgagtagggctgtaaaagctgatgaaatcagcgtagtagagcccactcaaccactgcgtcttgctcgacaatcctaaaacaatcaagaggctaggacttctgtcccagccactttttttgtggtctagaatatggtataatgagaagaatttgataggagcgtccaaatttttgaagacgctacggagaactgaggagtcggatatgaatctcacattacatgaagttgctcatctagtacatgcaaaaaatgatatcagccaatttgaagatgtggccctcgtcaagcctgaatttgacagccgtttgattgggcctggagacctgtttgttcctttaaagggagcgcgtgatggtcatgactttattgagactgcttttgaaaacggagccgtagccactttttcagagaaagtggtagaaggccacccttatattttggtggaagatgtgctgagcgcttttcaaacactagctgcagcctatcttcgaaagacaaaagtggatgtttttgcagtgacggggtcaaatggtaaaaccaccacaaaagatatgttggcacagcttttgtccaccacctacatgacctataaaacacaaggaaactataataacgaaattggtcttccttatacggttttgcatatgccagaagggacagacaaactggtccttgaaatggggcaagaccatctaggagatatccatctcttgtcagaactggcgcatccaaaagttgctattgtcaccttgattggggaagcccatttggaattctttaaagatcgaagtgagatcgcaaaaggaaaacttcagattgcggacgggatgccagaaggtggtcttctggtagttccagctgatccgatcgtgaatgcctacctccctgaaaaccaaacagtggtccgctttgggccagacgaggagatttttattaccgagttaatcgagcgaaaggacagcttaactttccgagcgaatttcttagaagaagcgattgatcttccggtaacaggaaaatacaatgcgaccaatgccatgattgcagcttatgttgccctgcaagaaggagtgagtgaagctgcgattcgtgatagtttcgaaaccttgcaattaacacgcaaccggacagaatggaagaaggcaagtaacggagcagatatcttatccgatgtctacaatgccaacccgacggccatgcgcctaatcttagaaactttctcgactattcctgccaatccaaatggtcgaaaattggccgtcctggcagatatgaaagaactaggggagcaatcggtagatctgcacaaccaaatgattctcagcctctcgccggatgttttggatacggttattttctatggccaagacattgcaggattggctcagttagcgagtcagatgttcccactcggacatgtctattatttcaagaagacagctgaggaagatcagtttgaggacatggtcaaacaagtcaaggaaagcttgaaagagcaagaccaaatccttatcaagggaagcaattccatgaatttgggcaaattggtagaggaattggagaatggtaagtaataatgtactgaaggacattcagcgcttgatttcaatcaccaatacaggcttagccttctcaaaagatccatttgatcaagagcgctaccaggatattcgtgaaattttacaggatcttgtgagagaaacgactgatctgaattcacaagaattatcggatttgtttcgaccgacaaactattatgacacccccttaattgatgttagggcttggattgtcaaagatagaaaactttgtctggtgaaaggtcagggagaagagacctgggctttgccgggtggttttggtgaggttggctattctcctaaagaaaatattttaaaggaaatccaagaagaaacgggctatgtagcacgtgtcaatcggttgttggcagtatttgataccaatcgctaccaattgcaaagccaccaatatgtgaaattggtatttgaatgtgaattgctggatggaagttttcaacagaatcaggaaatttccgatcttgcattttttgagagagagaaaatgcctgctctttctaccaagcgcaatacagaggaacaattgaatttcctttgggaggtttatgatgggaaacgagatttgtattgtgattaaaaacgatctataaattaaagggatataaacatgacactttgggatttattgtttacgaaccaaaaatcagccccgcctgagtttggactctggtattttttcctaccagtttccttgttggtggttggctacttttctatcaaatatgcgcagtcaaaaagctaccaacgcttttggtattgggcacaattgattcaagtcttgaccatcaatgcttggtatattctagcccacatgcctctgacagataatttgcctttttatcattgtcgcttggccatgcttgcgatcctttttgccccgagaggaacctatatcaagcaatattttgccttgttgggagttctaggatcgattgcagcattggtgtatccggcctttgatcctttcccattccctcacatcactgtgttgaatctggtttttagtcactgggccttgtttgctaatagtttgatttacctgcaagatttttatcagtcggaaaagcaagacagcttacgaattgttaagattacctttggcatgaatgccgtcatctttttggtcaacctcttgaccagaggggattacggcttcttacgacgtccaccaatcattggagaccacggtgctctcttgaactacctcttggtcagcatcgtgatggtagctggtatttgcttggtcaatcaacgctataaatacaaatacaagatggtcgaagagagtatagtttcgcgttcagaataaaaagagcagataagggaaagaaatcatgacactttgggacttatttttcaccagtcaaccaacggcccctcctcaattgggggtctggtatttcttattgccgacttcattggtggtagtgggagttttgtccattcgatttgctcactctaaaggctaccaaaacttttggtattgggggcaattgatccagttgctcattatcaacgcttggtatattgcagctcgcttgcctctttcagagagtcttcccttctatcatagtcggatggccatgtggattattctcttagctcctaagagcagcttcaaacaatattttgccctcgtgggagtctttggctccattatggccttggttcatcctgttttttatccctatccttttcctcacgtttcctcgatcaacaatgtctttggtcactgggctctcctggccaactgtttgatctatctggttcaatcctaccaggtggaagaaagggctgtttggaaaatctgtcagatgactgttggggtcaatgccattattcagcttgcgaatctcgcaacaggtggaaactacggctttatgcgtcgccctcctgtgatcggtgaccatggccttgtgctcaattatttgatcgtgacagtcctcatgacgggaacactgatcctcatcaatacaatcgttcagtacagtaagaaaagaagaatacctgaatctgtttaaataaggagactttatgcatcattttttcactacagaatcaacagcaccaccagcaatctcagcactttggtatagtttgatggtcttgttaattgtgacagcgatcatgatgtcacttcgctattatcagaatgagcaatttcgcaaatgctttcaatacttacagggcttccagttaatttgcttgtatctttggtattttgcctaccacattccttggtccaatagcttaccattttatcattgccgcttggccatgtttgcggtcttgtttttaccagaccgctggaaaagcaaacagttctttgccttgatgggagtgagtggagccatctttgctttgggctatccagtctttgatccctacactttccctcatattacaagcttttctttcctcctcggacattactgtctcctgatcaattccttgatttatctgttgagatggtatgatcgaaacctcttaaaaaatagtcagattgttctctatacctttgccttagatttattcctggttggagtcaatcaattgacgggaggaaattatggcttgatggctcgccctccgattatgagaggggataaggtgtggctcaactatctggttgtatccagtgttttagcccttgctttattactctttaatcagttcttcagtcgcagaagtgagcgggtgaaagtgagaaaataaatctgattgaattagactagaatcgacggattttagtctttctttttgctctcaaagaagaatcatcgttgaaaaaagtgcctattttcgctataataggacagatagagaaattgaggagagatccgatgtagagatgaatttgtaaatttatcaaaaataagaagagaaagaattaggaacatgaacgtacaagaagaaattaaaaaacgccgtacctttgccatcatctcccacccggatgctggtaaaacgacgattacagagcagttgctctactttggtggggaaattcgagaagctggtaccgtaaaaggaaagaaaacaggaaactttgctaaatccgactggatggacattgagaaacaacgtgggatttcggtaacctcatctgttatgcagtttgattacgatggcaaacgtgtcaatatccttgataccccagggcacgaggacttctcagaagatacttaccggaccttgatggctgtggatgcggcggttatggtcgtagactctgccaagggtatcgaggcccaaaccaagaaattgtttgaggttgtgaaacaccgtgggattccagtcttcacttttatgaataagttggaccgtgacggtcgcgagccactggacctcttgcaagaattggaagaagtcttgggcatcgcgagttatccaatgaactggccgatcgggatggggaaagcctttgaggggctttacgacctctataatcaacgcttggaactctacaaaggggatgaacgttttgcgagtttagaagatggagacaagctctttgccaacaatccattctacgagcaagtgaaagacgatatcgaacttttgcaagaagctggaaatgaattctcagaagaagccatccttgcgggtgaattaacaccagtcttcttcggatccgctttgaccaactttggagtacagactttcttggagactttcctcaagtttgctccagaaccacacggccacaagaagaccgatggagaaatggtggatccttacgataaggatttctcaggctttgtctttaaaatccaagccaacatggaccctcgtcaccgtgaccggattgcctttgttcggatcgtatcgggtgaatttgagcgtgggatgagtgtcaacctgcctcgtactggtaagggcgctaagctatcaaatgtcactcaatttatggccgaaagccgtgagaatgtcagcaatgctgtagcaggagacatcatcggggtctacgatacagggacttatcaggttggagatacgctgacagttggtaaaaacaagttcgaatttgaaccactgccaacctttacgcctgaaatcttcatgaaggtatctgccaagaacgttatgaagcaaaaatccttccacaaggggattgagcaattggtgcaagaaggagctatccagctctataccaactaccaaactggtgaatacatgttgggtgctgtcgggcaacttcagtttgaagtcttcaaacaccggatggaaaatgaatacaatgcagaagtggtcatgagcccaatgggtaaaaagaccgttcgctggatcaaaccagaagacctagatgagcgcatgtcttcaagccggaatatcttggctaaagaccgctttgaccaacctgttttcctctttgaaaatgactttgccctccgctggtttgcggataagtatccagacgttgagctggaagaaaagatggggtaaggaacgattcaaaaccgatccatgacaatagaaataagaaaacggaatcttgtccgttttcgcttataaaggagaaatgatgggattactaagtggtttgatgggcaatgcctctcaaaagaatgttgacaaagtagaaagagatctagaagatatcttggtgccgggagagcaagtcacacttgcttttagcttgattcgtgatttaatcgtctttacagagtttcgtttgatcttggtggataagcaaggagtaacaggaaagaaaacttcctacaaatcccttccttatcgctccatctctcgattttcagtagaaacttccggtcattttgatttggatgctgaattaaaaatctgggtctcttcagcagtggaaccttcagaagttttacaattcaagagtgacaacagtgtcattgaaatccagcaagcattagccagtgcggtctttaaataaaaaatcatgttgatagagaacagttgagaaaggagacggaatgtttatcgataaacaattgggtcaagatcggaaatggatcaatatcgactcggatttgattgctgaaaattcatatctttataaaaaatacgatattgacaaagaaaccattgagtacgcgatggataagaacgaacgtgcccatatggattacaatcgagaaaacggaacgatcacctttatctacaatgtattggatttagaaaaggacaaggaatactacgaaaccatccccatgacctttatcgttcaagatacgcgactcgtgaccatcagtaaccaggacaatgcctatatcattgaacaaatggttcgttatttggaaagccatgaggagctgtcgatctataagttgctttttgcaggtcttgaaatgatcagtaatgcttattatccgattattgatcgcttagataagcacaaagatgaactcaatcgtttgcttcgaaagacaacgacgacaaagaatctttatgccctgtctgaccttgagaccggtatggtgtatctggtcgcggcagccaagcaaaatcggatgttgctagaacatatcaaagcacatgtcatttatcgcaggatgaatgatgttgaaaaagagcagtttgatgatgccatgatcgaagcgcgtcagttggtttcaatgaccgagttgatttccaatgtcttacagcagttgtctggatcatacaacaatatcctaaacaacaacttgaatgacaacttgacaaccctaaccatctttgaagccttgttggcggtcttagccgttatcaccggtttctttggaatgaatatccctcttccgatgacagaggatcccaatgcttggatctatgtatccctatgtagctttatattatggctcattttggcaaaggtcatgcggtggattgtgaaaaaaagataaaaaaaagaggcttggagaaatccgagcctcttcgtatctagaataatctgagaaataggaaccatctagacacctgccctcctctccaaagaaggggcagtgtgaatagttcatcgactgtacaaaatcttcttggaaatagtaggagtagatttaatagtactgagtggttctaaataaatcagaacttagaataaatcgttgaatcagataaaatgatcctatttctttatacaaaaatattttaaatactaactgtattatacatatttatttgtaaaaacgcaagataagagttaccaaaaaataaaagttttccgatttttttatactccaatgatgaagtatatgaaatggtcgcaagaagaaaaccagtcctggctaggatttgcgtcacttttctgatttcaagcgatccaggattttttcctaaaaaataaaattaatctcctttgactatcatttgcctcttcattatgttatactagataagttgcaaacttgtatgagagaaatggtggggagactgaacagatggaaggcttctgttcgaaagaagactcccgcaagaaggatcttattgactgtttgtttgaaaaacaattccagtcagcaacatccgttaggacgcaaaacatttttctctaaagaaaatgtagtccataacagacggactaagtttttctttagatgagtcttgcgacaggtaaccaggaaggcgacttcctatgcaatcagtgcgttttcgcattgaaagaagtttgataaagtggcttcgcaccactttttagaaagaagaaagaattgaaattcaatgaatttaacttatctgctgcattattagcagaaatcgaaaaagctggctttgtagaagcaagcccgatccaagaacaaaccattcctttggctcttgaaggaaaagatgtcatcggtcaagcgcaaacagggactggtaaaacagctgctttcggtcttccaacgttggagaagattgatgtcgataacacagtgatccaagcccttgtcattgccccaacgcgtgaattggccgttcaaagtcaggaagaattgttccgctttggacgcagtaagggtgtcaaggttcgctctgtctatggtggatcaagcattgaaaagcaaattaaagctttgaagtcaggcgctcacatcgttgtgggaacacctggacgcttgctagatttgatcaagcgcaaggccttgaaactcgatcatattgaaaccttgatcctggatgaagcagatgaaatgctcaatatgggcttcttggaagatatcgaagccatcattagccgtgtcccagaaacacgccaaactcttctcttttcagcaacgatgccagaagccatcaaacgcatcggtgttcagtttatgaaagagccagaacacgttaagattgcggccaaagaattgacaaccgatttggtcgatcaatactatattcgtgtcaaagaaggcgaaaaatttgataccatgactcgattgatggatgtcgagcaaccggagcttgccattgtctttggtcggacgaaacgccgggtcgatgaattgactcgtggcttgaagattcgtggtttccgtgcagaaggaattcacggagatttggatcaaaacaagcgtcttcgagtccttcgtgacttcaaaaatggaaacttggacgtcttggtagcaacagacgttgcggcacgtggcttggatatttcaggtgttacccatgtctacaactacgatatcccacaagatccagaaagctatgttcaccggatcggacggacaggtcgtgctgggaaaacagggcaatccattacctttgtatcgccaaatgaaatgggctatttgcaaatcattgagaacttgaccaaaaagcggatgaagggaatgaaacctgcaacagcagaagaagctttccaagcgaaaaaacaagtagcactgaagaaaattgagcgagactttgaagatgaaaaaatccggaccaactttgagaagtttggcaaggatgctcgcaaattggctgcagcattcactcctgaagaattggctatgtatatcttaagcttgaccgttcaagatccagatagtcttccagaagttgaaattgcgcgtgaaaaaccattgccatttaaaccatccggtggtggctttggtgggaaaggcaaagggggccgtggaaatggccgtcgtggagaccaacgccgtgatcgaaatcgcagagatgaccgtgaaggtggacgccgtgatttcaaacgcaagtccaataaaaacagccgggactttgaaggcaaaggcaacaaacgtcctcatcgcacttccaatgaaaagaaaaatggatttgtcatccgcaacaaaggggataaataagtccgaaggaacggtctagcaatagaccgtttttttatatgaaaaataaaaaatacaagggttaaccagctgttaacccttgtatatttataaggagacctaaatgataactgactcttttagaaaaaatgtatcatgataaggagcatccaaaaaagtcagacaacagaaagaatgaattcctaaaatggaatatttctgttaacatattaagtctacaattatttccaagccttgtcaaggattttttcttatttttttaaaatttttgactagaaaaataaaaattgacaatctcttctaaaaggttataatgaatataataactatactaattaaaaagaggtgtcgcccatggtgattgcattaaaaaatggtgatctagaattacaatttaagacatttggtggggaattgagctccattcgaagtaaggaaggcatagaatatctctggcaaggggatccagagtattggtcaggacaggcgccggttctgtttccgatttgcgggagcgttcgtaatggccaagtacagtatcatctaaaagatggagtgaagacaggtcagctaccaagacacggcctcattcgcaagagagagtttgaacttaaagaacaaacagaccatcgtcttgtctttgaaatcacctctaacgaagagagcctgcaaaattatccctaccattttcgagttgaaatcgtttatgaactacaagggaaagaaatcaccatcacctatcgtgtacaaaatctagagtctgatcaagtcatgccttatttcattggagggcatccagccttttattgtccccttttagcagatgaagactatgaagactacgagttgatttttgaaaaagaagaaacctgtagcgtccctctcttgttcacagaaactggattggtcgatcgcctgcagcggacgccattttttgatcataagcgtagcctacctttgcgacatgaactatttgaaaaagatgccattattttagatcagttagcctctaaatctgtgaagcttatctcgaaaaaatcaggtaaaggtttggaatttgattttgcagattttgaaaatctggtcctttggtctactaataacaagggccccttcattgccttagagccttggacaggtatttccacatctgcagaagagggcgatttcttcgaagacaaaaaaggtgtaatccagttggaccctcaagagacacggagtcaccagtaccgtatcaccattttgtaaatgaaaaaccgttggactatggagtccgacggttctttttgatatagtttagttttgcttggcgcgatttctttttaaagagagcttcggcagacatagcagagggtttatctggataggcttcttggtaaagaagtttaacagggaggcgagcccgtgtgtatttggcgccttttccagcattgtgagtctttaggcgtttttcgacatccgtggtgtagccagtgtagagggagccatccgcacactctaggacatacatgtaagccttagtttccatagtagatctcatgaatctcttctgtatagctgccatcttcattgtgaataaagaggggaggcagaatttttaaaccgtccagtgagccatccttgatcgcttcaatcaataacatattcgcctctttggtcactttgggatagacaaactggatccgcttaggtgcaagattgtaacgcttcatggtttcgatgatatctaaaaagcgatctggacgatggaccatcgctaagcgaccatttgatttgagaacccgctgggccacatggcaaatctcatctaaattggtcgtaatttcatgccgagctaagaggtagtgttcactctcattgagattggaatgctcatccaccttgaaataaggaggattgcagaggatgatatccactttactgcccttgatatgttgaggcaaatgcttgaggtcatcggtgatcatggacatttgccggttcaagtcattgagagcaatggagcgggtagccatatccgccagacgttcctgaatttcgacaccaatgatctgggcctctgtccgagtacttgcaaaaagtcccacggccccatttccagcgcagagatctacgatcaatcctcgcttgggcaattttggaaagcgcgagagcaggacgctatccacggagtaactaaagacttcccgattttgtatgattttcacatcacttgaaaagagttgattgacgcgctcgccgtcttttaattcgatatctgtcatggctctattatagcatgaaaagaggcttggggaaagatcgatagaacataaaaagttgagagttttttctctcaacttttttaatcaaattcatatttttggagaatcgtagtgaggataaagactcctgtaaagatagccatcaatgccagataaactgggaaagtagtggctgtaaggagggaaatctcgattaagtttttcaacacgaccgcagatgcgtagaatcctactacagagaagatgatgaggagggcccgccagatatttagtggcaggcaagcacggataacggataggaaaccgatggatccaagtaagtagtaggatacagtagacatatcggctgcagaccaaccgtggcttgctccccaaaggcgaataaacaagacactaaagacgaccatcaaggcgcttggtaaggctaacagaagggaacgtctcaagaagtgtttttcaaccggtttgatattgcgttcaaaggtcaatacaaatggtgggaatccttcgacgaattggtcgatcagggtgatttgaatagggatgaaagggaaaatcagcaaatagttgacgttaaagaagagagcactggcaatacagatgatagccaagaggaaggaatagatcgttttgataaagaagattggagcgattcgtccaatgttattcaccacacgacggccttcaaaaagaatttctggaacgtcattaaagtcagagttcaaaagaacaatattggcaatttgacgggttgctggatctccctcggccatcacgatggaacagtctgcttcgcgaagagcaaggatatcattgaccccatctcctgtcatagcagtcgtccgaccagctgctttcaaggtttggatgagcagttttttctggtgaggagacacgcgtccaaagatagctgtttcttctgcttgatccactaattgatcatcagaaatttttgaacaatcgatgtagttttcataatttttgaagccagcttgttgagcgatataagagaccgtcacagggttatcaccggagatgattttgagatccactccttgagagcgcaaatactcaagagtatctgaagccccttcacgaatggggtctgtaatctcaataacagcaatcccttcaagattttcaggcagtttcaattcctgcatgctgatcagttctgaactgtgagccaaaacgagcacgcgcgatccacgagcttgtgcttcgacgacaggagcgggattttctttaaggagcatttcaggagcaccgagaaagacggttccaaggttggataggtgcatggctccccatttccgatcacttgagaaaggaataatgttttccgcagtataagcatgctccaactccccataagccttgcgaatagcttgagcagtaggattggtgtcctcgctatattgcatgtaagcagagaggatgacctgaatcgtctgttccgaaaaatgatcagataagctatggagagcttcgactgtcatcttcccttgagtgatggtaccggtcttatcaagacacaaggtatccacacgcgccagggtttctactgagtacatttcttggacaagaaccttgcgcatgccgagcttaataaccgctgtcaaaagagacgtaactgtcagtaaagcgattccctttggcaacattcccaagagagctgtggaagaattcacgacagaatctttgattggcagcatcttgatcaacaatgcttcaaagaagagtgcaaggccaaatgggatgataattttaccagtgaaactagaaattttcgctaaattatagagaatacgcgaattgataggcttcaaggttttggcttccatcatcagtttgttggcatagttgtttgctccaactcgcttgacacgagcatagacttgaccactggcaatataactaccagaaagaagttcatcgccaacttcttttaagaccagatcactctcaccagtcagcatagcctcattggcttctgcgataccggacatgacttcagcatcactagggatctgctcacccgaagacaagagcattagatcacccagaacgagcttttcgggtggaatcgcatctttttccccgtctcgaatgacagtcactagctcacgactcatgagattgagcttatcaatcatccgcttggcgcgcatctcggtcatgatccctgtaatggcattgaagcaaataaccgcgaaaaagatcatattgctccaagcttgtacagcagccaaggctaccgcgatcacaaaatttaaggtgttaaacaaggtaaagacgttgcgcttgataatttgccaggtactggtacttgtattcgttgtaaaatcattggtttgtccgtggtcaacttttttgcggacttcattttgggttaatccctttaaatcaatagtttccatagacaatatgatatcatttttttgagaaaaagactatctagaatcggtccgctgagacatttttatctaaaaaggtttgcggtcaaaatcaggatacggtataataagaaagaatgttttacatgattgaatatcttgtagagagacaaatgaaatggatttgaggaacaactatgttttatacctatctacgtggccttgttgcctttattctttgggtcttaaatgggaatgcccattaccatcatatggacaatattccagatcggaaagagaactacatcttggtatcccctcaccgaacttggtgggatccagtctatatggcctttgcaaccaagccaaaacaatttatctttatggctaaaaaagaactcttcaccaatcgtatttttggctggtggattcgcatgtgtggggcttttccgatcgaccgtgaaaatccgggagcagaagccattaagtatcctatcaatatgctgaaaaagagcaaccgttccttgattatgttcccaagtggaagccgtcattctcaagacgtcaaaggcggtgttgccatcattgccaaaatggctaaggtccgtatcatgccagtgacttatactggtccaagagatttgaaagggctggcaacgggtgaacgcattgatatgaactttggacatcccattgatatttcggatattaaaaagatgaatgacgaaggagtggcagaagttgcccgccgtatccaagaggagtttgaccgcttagatgctgaagcacaagcgatcaacaccccaacaaaaccttctctcttgattcgtttgttaaaaatccttttgattccccttgccttagtcgtaggcatcttgaccttgctctttagttacctagcaagctttgtatgggatccagataaacatcggaaaaacaagtaaaaaaattgagagtttttctcagtttttttttatttttacgaataataaaagtgagaggaggtttcttatggaggatatcatcgaaaaaatcaaagaatataagctctttttagctcttactgctattggactcttacttggtgggtattttcttttccatcgacctcagtcaagtgcatccaccataccggatatttatcaagcttctagttcaacttcgagcaaagaaaaggtgcagaccactagttccaaagaagaaaagacggttacttcagtgtctgatgcacccgagatcattacggtcgatgtcaaaggagctgtcaaacaaccaggtgtctatgagctacgctcaaatagcagagtccacgatgccattcataaggcgggtgggatgacagcagatgccaatagccaatcggtcaacttggcgcaaaaactctctgatgaagcagtgatctatgttgccaaagaaggggaagatgttccagcgcttggaagttcagaaagtcctgcaacttcgtcagcgccagcagaaaaaacaggcaaggtccatttgaatcgagcgacagagactgagcttcaaacggtatcgggaattggtcagaaacgagcccaggatattatcgcttatcgcgacgcaaatggcccttttcgatcagtggatgatctaaaaaatgtttcaggaatcggagagaaaacactggagaaactaagagatgctttcacggtggattaaagaccttcctttttcgcttgtccatctcgcctttttactcctatggttgtattttagtgtctatcaaccatcttggctttcaatcagcggtctagtagtagtgggaattttagcggttcatcactataaaggggatcgctcaagtttgctaggtcttgctttagcaaccctttgttttgcggccttctttgtctttcagcgaatacaggatcatccagtacaagtagaaagtcagcccccatcccacttacgcctgattccagatactatcaagatcaatggggacgccctgtcttttcgtgctaaaaatcaaggaaggacctaccaagtcttctacactttaaaatcagaaaaagaaaaacagcattggcaaagtcaaactcacttgctggagttgacatataaaggtgttatagaagagccagaagggcaacgaaattttagaggatttgactaccggtcttatttgcagactcaggggattcactatcaaataaaaattgaagcgatccaatccgctcttcccatccagacgtggaatgtttttgactggctatctcaatggaggcgccaagccattgtttggagcaaggagcacttcccgcagccgatgaaccagtatatgaccggccttctttttggctatttagatacggattttgaagagatggatcagctttacacgagtttaggaatcatccatttattcgccttatcggggatgcaggtcggctttttcatcaatgggatccggaaagctctcttacgtctaggaatcttgcaagagacagtcgatatctggatggttccaatttctttggtgtatgctggcttgacaggtttttcagtttcagtggttcgcagtctcttgcagaagattctctctcaaaagagcatccgagggatggagaatatggcgatgaccttgatgctcttaatgctgctcatgcccaagtttctcctgacagctggaggggtcttgagttgtgcctatgcctttattttgaccttggtagataccagttcttattcaggacttaaaaagctactagtggaaagtttctggattagcctggggattttgccccttttgacctattactttagtgtctttcaaccgtggtcactccctttaaccttcctcttttctttcttatttgaccttgtccttcttccaggtttaacggtgctatttatcttatcgattctaaagccccttacaatttttaacagtttctttcttctcatagaggagtgtattcgttggatttcaaagctcacgtccttacctttggtatttggtcagccgacgggaccagctctgattgctctctttcttcttttagggatcttatatgatcttcgaaagcaaaaaaaacgtcgtttcctgttaataggtatgattctactcatcttttgttggaccaagcatcctttagaaaatgagatcaccatggtggatatcggtcaaggagatagtatctttttacgcgattggaaaggaagaaccatattgattgatgtcggaggacgcgtcacttttaaaagtggagacaagtggcaagagcgcagtcaatctgccaatgcggatcaaaccctgattccctatctcaagagtcgaggtgttggaaaactcgatgctttggtcttgactcatacagaccaggaccatatgggcgatatgttagaggttgcaagacaaatcccggttaaaaaagtgtatgtcagtccaggaagtctaaccagttcgaaatttcaagagaaattgaaacagcttcatagtccgattaaagtagtccagagaggggatcgtcttcctatttttgatcatgatctagaagtcttatcccctgatgaagtgggggatggtaaaaatgatgattcgattgtcctctatgggcagttctatcagaaacgatttttgttcacgggtgatctggaaggagctggagagaaaaaacttttggaaaactatccacaattacaagtggatgtcttgaaagtaggccaccacggttctaaaggttcctctagtgatgtgtttttggatcaggtacatcctcaattggccttgatttctgttggcaagaaaaatcgctaccagcatccccataaagaattactcgatcgattagaggaacgatctatttcttatcttcgtaccgatgaaagaggagcgattcgcttgattggatgggaccattggagggtggaaacggtccgctagagacgaggagaggtttgctttctatgctgaaaattgctattatagaaggtgaaatcaatgtaaaggtagaatcgtatgaacgcatttaagcaattttggatacagtatgcagatttttcaagtaagaccagtcgagctcatttttggctagcttttttctggaatttcctgatttctttgcctctttgggttttttacgtagtgacttctttatcccatcaaaatgctcaagaaacgctcaatttttcaactgttcattctaagacaggtttatgggcgctcgctttcttagcattcttttacttcctcattttggtacccagtcaagccatttgtgtgcgtcgcttgcgggatgcaggaatccattggtcttggatctttttgaaccttggtccggttctgttctatttgttgacggggctagatattttcctatttctctgggtgatcacagttatttccctcttgattctcatgatgcttccagggaaaaacaccttcccacaatcaatggaaactcctatgggagtggcttctgaaccacaggttacagcgacaggggggagctttggaggcaactcgtttgagcagattcctaattttgtagcagcacctgatttgtccgacgaaaaaccaccattggaacaaaaaatggctgctgaacacgaaatacactaaactgataaagataagagagtttcatgcaagcaattaccgacactaaacatctgacggttcaaactctgcctcctattcttgtcttgacaggagaggatgtaggtcaatttgaatggttaaaaaaagatattttaaataaaataggctatgatccttcagatttgaattattcttattttgatatgaatgaagcctcctatgatgaggtcgagctggatttggtcagtcttcccttttttgcagatgaaaaaatcgtgattttggatcacttattggatgtgaccactgccaaaaaacgcaatttaacagatgaagatctaaagcaatttgaaaactatctggaaaatccttctgaattgacccgtttggtgatatttgcagaaggaaaattagatagtaagcgccgcttggtcaaactcctaaaacgggatgcccaaatcattgaagcgacaacgcctaaagagcaagaggtaaaacgttattttgcaagtcaggcccaagaattgggcttgcagtttgagggcgattccttggaccagctactcttaaaatctggctatgattttggagagttacagaagaatatcgctctactgcaggcttataaagaagatggtcagattaccctcgaagatatcgaggaggttgttccaaagtccttgcaagataatatttttgatctgacacaaatgattctcaaacgccaaatcgatcaagcccggaatttggtgaaggatctccgcttacaaggagaagatgagataaaattgatcgctattctgttggggcaattccgaatgttttctcaagttaaaattttctcagaagaaggccaatccgaaagccaaattgtagcgagcttgtcggagttgtcaggacgcaaggtcaatccttaccaggtgaagtttgccttacgggatagccgcaggctttccctgtcctttttgaagcaggctatgatgactttcatcgagacggattttgcgattaaaagtggaacatatgaaaaagactacttatttgatttggccctgttgaaagtagcgaatagcgtctaaatacgaatgaaatcgcaagcagattagttgaataatttagctgtttgcgttatcatcaagtcagtaataaagaaaagaggaccataaaatggctatcattttaccagaattaccatatgcttatgatgcattggaaccttatatcgatgaagaaaccatgcatttgcaccatgataaacaccatcaaacatatgtaaacaatgttaatgcagctcttgaaaaacatcctgaaattggagaagaccttgaaagcttgttagctgatgttgaatccattccagctgacattcgccaagctgtaatcaacaatggtggtggtcatttgaaccatgctcttttctgggaattgatgactccagaacaaacagctccttcagcagaacttgctgcagcgattgatgctacatttggttcatttgaagacttcaaagcagccttcacagcagcagcaacgacacgttttggttctggctgggcatggttggttgtcaacaaagaaggcaaactcgaagtgacttcaacagcaaaccaagatacaccactctctgaaggtaaaacaccaatccttggtttggatgtctgggaacacgcttactacgtgaaataccgtaacgtacgtcctgactacatcaaagctttcttctcagtgatcaactggaataaagttaatgaattgtttgtagcagcaaaataataatccatagtgaatctataggaacaggtctttgtttttatagattttttttgtgaattcatcttgaaatcggagtataattccttgcgtttggacggtaaaatgatacactagtagaaatgtgtcacacctatgtgaaacctgtttaaagtgattaggtaggacgaagtcaaaacgataaataaaatctgaaagttcagggagaaatgaaatgactagtattgctattaccaaaggagttgtcgatacgccaatctacttacagatggtgaatcggcatggcttgattgcgggtgcaacagggacagggaaaacagtcactcttaaggtcctaacagaaaaattaagtaaagaaggtattccagtttttcttgcagatatcaaaggagatttatctggattagcgaaagcggggcaatggacaccaaaactggaagaacgctataagcttattggaatcacagatccttttgagccacaagcttttcctgtccgattgtgggatgtctttggccaagcaggccatcctgtccgtgcgactgttgaaggaatgggttcattattcctttctcgtcttcttgatttaaatgagactcagacagggattttagcgattgtttttaaattagccaaggagaaagagtggcctttgatagatttgaaggacttgcaaagtcttttaaaggaagtctatgaacatagttcggaatattcagcccattatggcaatattaccaaacagtctgttggagcgatccaaagaagtctcttggttttggaagaagaaggagcagatcagtttttcggtgagccagcacttgatttaaatgatttcatgcaactcgatgcatctggtcgtggttatatcaatattctttctgctacaaagctctttcattcacctaaattgtattcaacctttttgatctggatgctgtctcgtctctttgaaacacttccagaggttggggatcctgaaaagccaaaattggtcttcttctttgatgaagcgcatctcctctttaaggatgcgagcaagctctttcttgagaaggtcgagcaagtggtacgcttgattcgatctaagggtgtagggatttactttattacccaaaatcctcaagacctaccagagtctgttttagcgcaacttgggaatcgtattcagcatgctcttcgagcttacactccaaaagaaatgaaggcgattaaggttgctgcccaaagttttcgtccgaatccagattttgatacagaaactgtgattactgagttagggacaggggaagccttggtttctttcctgaatgaaaagggacagcctagtgtggttgagcgtacctttattctttctcctcaatccagttttgatctgttaaatgaaagtgaacaattggccttgatcacaacatcgcctctccatcaaaagtatgcgacagcgattgaccgagaatctgcctatgaaaaattagtggctaaagcaagcaaggaagtgcaagaagagaaaaaagaagcagaaaaagaacggtctgcaacagaaaaaacagagcaaaaacgcagtccaggtcgtccaaggaaatccagtcttgaaaaggcaaaagattccttcttgagttctttattccggacgatcgcgcgtgaaattgctaagctcattatgggctcctttaaacagaagtaatttctttaaagaagagggatatttttttaaaaaataaaccgttttccccttctgattattcttgttatttttagtagaatcttttataattaattctatatgaaaaaatattttaatctacgctcgattatgattggaatcagcatccttttgtgcctggtgggaacaggtgtattggggtatttgcatctcacgcaaccaacagtatcagcaattgaaaacaaagcaaagaaaacaaaaaaattagatgtagaaaagtcaaccccagagaccaaaaaaccacgtgtcaaatctccagaagctaagcaagcagttgtagacgcagatatggagacgatgagcgcttatggccttgtctatgattatgctaataaaggtttggtagaggttgttcaggatttcttagcagaaagtggaattgatccatcacaaattgcctttacttatcgtaatgccattacaggagagcagtttgcgatgaatgatcttcaaccaatgactgcaggaagtacctacaagttgccgttgaatatgttggtggtagatgaggttgcaaaaggcaaactgaatttaacagatcggtttgatattaccaatacctactatgaatatgtcggtgagcatgacaattacgtcgcagcctttgatggagccatgtctatccctgatatgcaacgctattcattggtttactctgaaaataccccagcttatgccttagcagatcgattgggtggcatggagcaagcgcggaagctattcagtcgctatggtcaatcccgttcaccagaagtaaagacctttagcgatgaaaataaaacgacaacagattactatatccatgttttggaatatctttggaatcatcaagaaaaatatgcagatttgttggaattgattggggagtctttcccaggtgagtactataagaaattcttaccggatttggtcattcaacaaaaaccaggctatgttgctgaagctttgaatgtggacgctattgtgcgtgaatctactccgtacctgatcgccatttataccgcaggtcttggaggaacgactccagaaagttctgagatcagtggtgtcggtctgtatcaattgggtcaattggcttatgttatcaatgaatggcatcgagttaatatgaatgaataatcgacaaaaggtctgagggttgttcaggccttttattctattaaagtaggatgaaattcacttgttgttttgaattacttttctgttctaaagagacttctttcccttttctataaaaagtatgttatactaataatagtaataagaggaagtatagacatgattacaaaggaagattaccagttgcttcgcttgcatcctgcattttctgcgttgccagtggagctttttgataaattagctgttgaaattcatgccagggatatccctaagggacaaattttattttttgcaggagatagacgggatcgcatattccttctagtggagggctttgttcgcattgagcaatttgattcttctgaccaattctcctatatggattacattaagaaagggtccttgtttccttatggtggaatgttccaggacgaacgctaccactatacagccagtgctgtaacggatttacgctgttttgtaattcccgtcaatctttatgagatgtctgctcaagaaagcaaggagcaattgctcttcattacgagaaagctttcgtcgattctagaatttcaagagttgcgtctacgtaatgttgtgacagccagtgctagtgatcgcgtggttcagtctttggccatattatgcaaggactatgaaagccttggaaatcaacttccatttccgattagtatgaaggaaatggccaaattagcggcaacaactcgagaaacagtcaatcaagttttaaagaaactcatcgattctcgtaagattcagtatgaaagaaaacaactaacttttctagatacagcctactttttaaagagctttgaagagatcaactaatttgttgatctttttttatattttacaaaaaaatatatattcacaaaaataatataaaagacaaaatattcaaagaaaacgcttcatattgactaaaatatagataacattcaaaaaaacacaaaattctttgcattcaaaaagtagaatccttcgtgaaagcggtaacaataaaggatataataacaattgtaataaagcttgtgaacaagctcaaagaaaaaaggaggatgacagatgtcaactaaaccaattcatgttttctctgaaattggaaaactgaaaaaagtaatgttgcaccgtccaggtaaagagttggaaaacttgatgcctgactatctagagcgtcttctttttgatgatattccattcttggaagatgctcaaaaagaacacgacaattttgctcaagcgcttcgtaacgaaggaatcgaagtactttatcttgaaaaattggcagctgagtcattgactactccagaaattcgcgaacaattcatcgaagaatatcttgatgaagcaaacattcgtggtcgccaaactaaaaacgctattcgcgaaatccttcgtggtattgaagacaaccaagaattggttgaaaaaacaatggctggtttccaaaaagctgagcttccagaaattccagaagctgataaaggcttgacagaccttgttgaatctgactacccatttgcgattgatccaatgccaaacttgtacttcacacgtgacccatttgctacaattgggaatgcagtatcattgaaccacatgtatgctgatacacgtaaccgtgaaactttgtatggtaaatacatcttcaaatatcacccagtatatggtggtaatgtagatttggtatacaaccgtgaagaagatactcgtatcgaaggtggggacgaattggtcctttctaaagatgtcttggcagttggtatctcacaacgtacagatgctgcatcaatcgaaaaattgttggtaaacatcttcaagaagaacgttggcttcaagaaagtattggccttcgaatttgcaaacaaccgtaaattcatgcacttggatacagtattcacaatggtggactacgataaattcacaatccacccagaaattcaaggaaaccttcgcgtcttctctgtaacatatgaaaatgaagcattgaagattgttgaagaaaaaggtgatttggctgaattgcttgctgaaaaccttggtgtagaaaaagttacattgatcccttgtggtgatggcaatgtggttgcagctgctcgtgaacaatggaacgacggatcaaatactcttacaatcgcacctggtgtggtagttgtatacgatcgtaacacagtcacaaacaagaaattagaagaatacggacttcgtttgattaagatccgcggaagtgaattggttcgcggtcgtggtggacctcgttgtatgtcaatgccatttgaacgtgaagaaatctaatagagaagaccgagagctggtctttgaggatcagctctttcttcttactgatcaatactagaaagaaaataggagacaaatagaatgacaaattcagtgttccaaggacgtagctttttggcagaaaaagactttacacgtgctgagttagaataccttatcggactttcagctcacttgaaagaccttaaaaaacgcaacattgaacaccactatcttgcaggtaaaaacattgcgcttttgtttgaaaaaacttcaactcgtactcgtgcagccttcactactgcagccatcgaccttggtgctcacccagaataccttggtgcaaacgacatccaacttggtaaaaaagaatctacagaagatactgctaaagttcttggacgtatgtttgacggtattgaattccgtggtttcagccaacgtatggttgaagaattggctgaattctcaggtgttccagtatggaatggtttgactgacgaatggcacccaactcaaatgcttgcagactacttgacagttcaagaaaactttggacgtttggaaggtttgacacttgtatactgtggtgatggacgtaacaacgttgcaaacagccttcttgtaacaggtgctatccttggtgtgaacgtacacatcttctcaccaaaagaactcttcccagaaaaagaaatcgttgagttggcagaaggatttgcaaaagaaagtggcgctcatatcttgatcactgaagatgccgacgaagcagtgaaaggtgcagacgtactttacactgatgtttgggtatcaatgggtgaagaagacaaatttgcagaacgtgttgcccttttgaaaccttaccaagtaaacatggatttgattaagaaagctgataacgaagacttgatcttcttgcactgcttaccagccttccacgatacaaatactgtttacggtaaagatgttgctgaaaaattcggcgtagaagaaatggaagttactgacgaagtgttccgtagcaaatatgctcgtcactttgaccaagctgaaaaccgtatgcacacaatcaaagcggttatggcagctactcttggtaacttgtacattccaaaagtttaagactttataaccgtataccaacagctataggggctggactgctagctttagtcctgcccctattttttatagaaggggaaaacttatgtcaagaaaaatcgtcgttgctttgggaggaaatgctattctctcatctgatccttctgcacaagctcaacaagaagcacttgtagaaacagcaaaacacttagtcaaattaatcaaaaacggggatgacttgatcatcactcacggaaatggtcctcaagtaggaaaccttttgctccaacacttggcagcaaactctgaaaagaaccctgctttcccacttgattcattagttgctatgaccgaaggaagcattggctactggcttcaaaatgctcttcaaaatgctcttcttgaagaaggaattgaaaaagatgtggcttctgttgtgacacaagtcgttgttgataagaacgacccagcttttgtcaatctcagcaaaccaatcggtccattctactcagaagaagaagcaaaagcagaagctgaaaaatctggagcaactttcaaagaagatgctggtcgtggctggcgtaaagttgttgcttcaccaaaaccagtggatatcaaagaaatcaataccatccgtactttgttgaacgacggtcaagtcgttgtggcagccggtggtggcggtatcccagttgtgaaagaagcagatggtagcctatctggtgttgaagctgtcatcgataaagacttcgcatctcaacgtttggctgaattagtagaagcagacctcttcatcgtcttgactggtgtcgattatgtctttgtgaactacaataaaccagaccaagcaaaattggaacatgttaatgtggctcaattggaagaatatatcaaacaagaccaatttgcaccaggaagcatgcttcctaaagtggaagctgccattgccttcgtcaatggtcgcccagaaggaaaagcagttattacatcacttgaaaacctgggagctttgattgagtctgaaagtggaacaatcatccaaaaagactaatgaaaaattaggaaaaaactagtattttaaagcttattgtgatagaataagtctataggtaagcgttttacaagagactcttgtaaaacatcactcacactttgttgcgttaggaggaagacaaatgagtgaaaaaacaaaaaaaggatttaagatgccttcatctttttccgtattgttaattatcattgctattatggcagtgttaacttggattattccagctggtcaatacaaggttgacgatgcaggtgctatcattgcaggtagttatgaatctgtaaaagcacatcctcaagggatttgggatgtcttgatggccccaatcaatgccatgcttggtaaagcaccaactagtgcagcgattgacgtagccttcttcatcttgatggtcggtggtttccttggagttgtgaacgaaacaggtacccttgatgtagggattgcttcaatcgttcgtaaatacaaaggccgcgaaaaaatgttgatcttgatcttgatgccattgtttgcccttggtgggacaacttatggtatgggtgaagaaaccatggccttctatccacttctcgtaccagttatgatgtctgttggctttgacagcttgacaggggttgcgattgtacttctaggttctcaaatcggatgtttggcttctacattgaatccatttgcaacggttattgcatctgatacagctggtatctcaagtgcatcaggattgttgctccgtgtgattttctgggtagtcatgactgctcttagtacctactatgtataccgttatgcagacaaggttcaaaaggatcctaaagcatccttgacttatgcaactcgtgaagaagatttgaaacacttcaacgtagaaagtggtgaagaaattccttcacaaatgaacaagaaacaaaaacgtgtcttgctcgtcttcatctcaacattcgttatcatggttgctggatttatcccattcaaagatttgggtattacattctttgacaactttaacgaatctctccataaaattccagtacttggtcaattgatcggtaacacagatgctcttggtacatggtacttccctcaaacagctatgctctttgccttcatgggaatccttgtgggtatcatttatggcttgaaagaagataaaatcatttcatccttcatgaatggtgcagctgacctcttgagtgttgcgtttatcgtagcagtagcacgtggtatccaagtcattatgaacgatggtatgatcactgcgacaatccttcactggggtgaagaaggacttaaaggtctttcatctcaattgttcattgtcttgacttacattttctacttgccaatgtcattcttgatcccatcatcatctggacttgctagcgcgacaatggggatcatggcacctcttggtaaattcgtcaacgtaccaggtagcttgattgtcacagcttaccaatctgcatctggtgtcttgaatttgatcgcaccaacttcaggtatcgtaatgggagctcttgctcttggacgtgttgaaatcagtacatggtggaaattcatgggtaaattggttgtagcgattgttgtgatcaccattgcccttcttctactcggaactgtagttccattcttgcaatagaataaagtaggtgtttcatgaaaaaaagaattaaggacgatgtgaaagagcagtttttaaactcgcttcaaaccatcatttcttatccttctgtattaaatgaaggggaaaatggaacaccgtttggacaagctatccaagatgtcctagaaaaaaccttagagcttgctcgagaattaggttttcaaacatatatagatcctgaaggatactatggatatgcagagatcggtcagggggaagaactcctggccgttctttgtcacttggatgttgttccagccggtgatttacaagattggcaaacgccaccttttgaagcgaccattgtcggtgattatctagtaggtcgtggtgtgcaggatgataagggaccgtctcttgctgccctctacgcagttaagagtttgatggatgatggcatccagtttaccaaacgaatccgctttatctttgggacggatgaagaaaccttgtggcgctgtatgaaccgctacaaccaaatcgaagagcaagcagatcttggatttgcaccggattcctctttccccttaacctatgctgaaaaaggcttattacaagtgaaattgcatggcccaggttgggatgatcttcccttacaggctggtcaggccctcaatgttgttccagacaaggcgacctatgctggtcatcgtttggaagagttgcttcctgttttggatcaaagtggggttcagtatagccaaacagaaaattctgtaacggttttgggtatttccaagcactctaaagatgcagccgaaggagtcaatgccatagtcggtttagcggaaagtctgtccctcatccaaccccatccagctttgctctttatcgcagatgctgttggtgaggatgcaactggtgaggctctatttggcagaattacagacgaaccaagtggagatctttcctttaatcttgcgacccttgtgatcgatcaagaacaatcggaaatcggaattgatatccggatccccgtcttagcagataaggaggccttagtagctcgtttgcgagaaattgcagctagttatcagttggaatatgaagagtttgattatctggctcctttatatgttcctttggatagtcctttagtcagctctttgatggccgtttatcaggaagaaactggggataagacgccagctatgtcttctggtggtgcgacatttgcgcggaccatggaaaattgtgttgcctttggggctcttttcccaggtgcagaacagaccgagcaccaagccaatgaacgtgcaaaaattgaagatctctatgctgcgatggaaatctatcgagaagccattcaacgcttagctacaacataaaaagtttggaaacttggtttccaaactttttatttactaaagaagaagggtggggtgaattcttttaatttttcaaaacaatccaaagctccttgattgtcttcgcagatgaccaaacagacatcgtctccacaaatggtggctacaatttcttggagttccaatgcatctaagatcgctccaaaggattgggcaagacctggaagagtttttacaacgacctggttttgaacaggccgcaacatgactaaggcatcttccatatacatccgcaggcgcttttcccaacgggaaggagcgatggtgttcatggcatagtaggaactatccccctcgttaatttttactagattcaaggatttgacatcccgtgaaagggtggactgggtaacgagaacgccattagcttctaaggcttcttgaagttcttgttgggtatgaatcctacgctcagaaataatagagcggatcaagcggtggcgactttcaattttattcatgagagactcctttacttgatgaacatagcatccccaaaactgaagaagcggtagcgttcttgaatcgcatggtggtatgcttcgagggttaattcacggccggcaaaggcagaaaccaacatgaccagagttgattttggaaggtggaagttggttgaaaaggcatcgacgactttccattcataacctggtttgataaaaatattggtccagcctgaatcagcttggatgtctccatcaaatttgttgccaatcgtttcaagggtccgaatagaagtcgttccgacggccacgatgcgttttcctgcagcttttacctgacgaagggtcgcggcagcttcttcagaaagttggtagaattcagagtgcatctcatggtcttcaagattgtccacggatactggacggaaggttcccaggcccacatgaagggtcaaatagaccaggtgaacaccttttgcttcaatcttttggagcaattcttgggtgaaatgaagacctgccgttggagctgcagcagaaccattttctttggcgtaaacggtttggtaacgttcgcggtcagcaagcttttcgtgaatatagggaggaagtggcatttcgccaaggctttctagaacttctaagaaaatcccttgatagtggaagcgaacgatacggcctccatgctccaattcttcctcgacagttgcggccaaacgaccatctccaaaactgactgtggcccctacctttaagcgttttgcaggttttgccaagacttcccaacagtcatcttgcgtatttttaaggagaaggaattcgacgtgaccacctgtttctggtttgactccatgaagacgggcaggtagcacgcgcgtattgttcatgacaagagcatctcctggctccaattcatccaaaattgcatcaaaatgacggtcttggaattgccctgtttttcgatcgagaatcaagagtttagaggcatcgcgtttttcaagaggggtttgggcaatcagttcttcaggtaaatcaaagtcaaagtcgtttgtgttcatttgtgctcctttaaagtaaatttgagagtagatagatggttgttccaatagccaatagcatcaggcaagttcctatcaaaaatattatagcccttaggacttttcttcggtgaatcaaaaaagataagagaaaaacaagaagtcctatcaaaaaaatgataaataatatagttacaatcataccattcattatatcacgaatcgaatctaaaatgaaaaaatacaaaaaaagatagcggtttcacttgacaaaaattggtctataccatataataaaaccatagagatataggaggtctaccgcatgaagattattgaagttcaggaccaaattgagggtggaaaagttgcctttgatctgttgaaagaaaaattacaggaaggagctcaaaccataggtcttgcgacgggaagcagtccccttgaattttacaaacaaattcgcgaaagtgatttggacttatctaatctaattagtgttaacttagatgaatatgtaggattaacaggagatgatcctcaatcctaccgttatttcatggagaaaaatctctttgatgccaaaccatttaaagaaagctacctcccaataggtgtagaagaaacagccgaacaagaagttgcacgttataatcaaattttagaagaacatcctgtagatcttcaaattctaggggttgggcgcaatggacatatcggtttcaatgagccagggacatcctttgatagccaaacccatttagtccagttggatacttctacgattgaagcgaactctcgtttctttgataaaattgaggatgtaccaaccaaggcaatttcgatgggaattgctaatatcttagcagcaaaatcgattgttttgtttgcttatggggaatcgaaagcccaagcgattaaaggaacagtagagggtgaaaagacagaagaagtgcctgcaagtgcccttcagggacatccagatgtgaccatcattgcggataaggaagctttgagcttgttaagtcgataaaaaacaggacctatcgccgatttattcgtgctagataggtttttttctgcttcaaagtatggtacaatacaagtaattatctgctgggattagctcttttcatctactgggagacaagagaaaagggcatgagggctagaagcttgttttagcctccagctgaatagtctgttataaaggaatagtttatgataaaaaaatatttgatccatatttgcctccttctgagtctcttatgccagccaattctagctagtgcggatgaattggtggatatggcgcaaaagatgtacccaaatgacaatgtccaagccattaaccgtccgcattcttctctcattattgacggcaatacgggaaatgttctttggaaagacaatatcgatgaagtcagagatcctgccagcatgagtaagctcatgacgctctatctcttgtttgaagatatggcaaatggcaagatcagtaaggatacagtgatcaaggcgaccgcttcagaccaagcgatcggaaagatctatgaaatctccaacaataatattgttgctggggtagactacacaattcctgagttgattaccatgacagtggttccatcctcaaatgtatcgaccctcatgttggccaatctcatgtccaacaatgatccagatgcctttatcgagcgtatgaatgccaaggctaaggaattggggatgaccaatacggtctggaataacccaagcggggcggccatctccaccttgcaaggctactatcaggtaaacaattatccaaatgatgcggctaaccagacaactgcgcgtgatttgggaattttggtctatcattttatcaatcaatacccagatattttaaactataccaatcaagcacaagtcacggtcaaaaaggggactccgtatgaggaaacctttgatacctacaattattcattgccaggagccaagtatgctttgaaaggtgtggatggtttaaaaactggatcaagtcctcgtggagctttcaattatatcgcgaccatcaaacggggcaatcagcgcttaattgctgtcattatgggcgtaggagattgggcagaccaagatggggaatattatcgtcacccgtttgggaatgctttgatcgaaaaagcttataaagattttggctataaaaaattgttagatgcaggtgtccagaagattgacggcaagacctatacactcgaaaaacccttctatgcaacggttaaaaaaggtgctaaagaaccgacccttgcggtaaaagatggctatctgacagtagataatgatctctacactttgtctgaaggtatccgagatgatatgaaggtggaagaaggggctaagccagagcttgtcaaagaaaaagctgatggaaaaaagacaacggctaagcaaagtaaatggctttcgctggatcacttcctaattttgattccgattctcattcttgtcatcattctctcgattgaaaaacaaagtcgtgagagacgcaaaaaaaaggctcaaaagcgctataataaaaaataaatagaaactcaactggtgatcagttgggttttgtcgttgtttcgttcatacttatttagaaaaggattcatatgaaaaaattccgaaattcttatgcagcttatatgttgctctatagtttttattttatgtccacatctctctttacgaccctcatttccgtctatttgatgggaaagcactatagtgcaacccaagtgtcgaccttggtatcggttgcctttttcttatctatggtagcccaacctttctttgggtatatcaatgagcgatttggaatcgtaaaaatgacgaccctcagtctgagtgtgatcattggtggtgtcctaggttttctttgggcacctaatctcttttggctgaccgttttttatgggattgttctagtctgtttgaatgggacagctcccatgatggaagtatttgcaacgcaaagtccatacgcttttgggaagattcgcgtttggggaaccattggctactcggtcggtgttcaaatagccggctgggtctatcatcaatttagcccccaagctgtctattatacggttttgatcactattgtactcagtattttctgtctgagtgcagttcggatgaagacaagagagaaaaaagaagaaaaggttaaagagccagtttctattcgtcctcttcttcacaatgtgccttacctcttctttatcattttgattggcttggcttcaggtgttggaaatattggtcatacctatattcctgagttgctcatggatagtggtctaccagttcatattgcctcaacagttgtggctatctcggttgtagtggaagcccccttgatctttttctctgatcgattcatggaccactggcctttacgggttttgatcgctcttccaattgggattattttcgctcaatatgctgtctatgctcttccaagtcctgtcttcttaaaagtgataatgactctcttagctaagcacacgacagggatggttttgattatggtctccttacggtttatcgcccaacaggtaaatggcaaagacttggttcttgccatggccattgtccaaggagctcgttatttaggaaccattcttttacaacccctcgcagccctctgtattgaaagaggtggttaccaagtcatgagtttctttttagcaggggttgtagggatcgtctttttactgagttttgccttaaaaatgccccaagggaaggctcacggcctttttggtggtaaagtagactaatgaaattgttacaattgtatgactaatcatcgagaagttggacagaaacattgattttacagtgttttgtccaacttttttgctattattgagaactagtgattaatttgacaatcaaagtatccgatggtagaatgaggtaaaataaatataaaggagaccattttatgaaaaaaatgatcttatcgacagctgctcttttgacgattgtttcacttgctgcttgttcaaacaaacaagacacaaagaaggaaacttcaaacagtcaatcaactactaaagtgacgagcaaatctgccaacacttcaaaaaataaggatacttcaacagattcagaagatacatccacttctagtctcttaacagatgctgaaatcagcaaggctaaaacagttggagacttcaaaaagttatttgcaaaactaatggatcaaacagtttctcttactgaagaagcaggtgcttctgtgacaggctcagccaaagtgggctatgatgcgactgtcagtagcttgaagcaacaaatggaaactcaaaaagaaatctttaatgaaggattggagactattggatccgacagtactattgttcctaaagaagaccgtgaagctctgatcgaaagcttgaaagatgctcgagaagagttggaaagcgctcgtaaagaaatgaaagatttgcagaaagaattgagtaaatttcctgttgcagatgataacagtgatgattcggattcagattctgaagaataaaaggaagaaagggttggaaatttccagcctttttcttatttttttcgaatgatatagatgaggaggtggggctatgtttattgccatggataaagatcaaaagcggtggaactgtatcaaggaggtcccacctacaacagctggtcctttttattgcttggcttgtcacagtcaagtgcgtctaaaaaatggctcggttctacggcctcattttgctcatgtagaattacagcattgtccctaccatcacgaagcggagagttttgaacatctggaattgaaagccagtctttatgattgggcctctaaggagtctaaaacagaggtagaaagttatttagcagactttcaacaaattgccgatcttttggtagtagacaagaacttagctttagaagtgcagtgtagctccctatctttagaacgcttgaaggagagaagcgatgcgtatcgatcccatggttaccaggtctattggttacttggtaaaaagttgtggctcaaggaaaggttaacaaaactgcaggctggttttctttattttagtcagaatcgagggttccatctttgggaattggatttgacaaagaaagagctacgtttacaatacctcattcatgaggatttacgagggcgattgcattatcaaacagaaattttcccttttggtcaaaggtctttactagaagtcttacggaccccttatctttcgcaacccatgcagcaaatggcagtcgagctcgatcggacatttttaacgtatatacagcagcaactcttttatcgtcacccaaagtggatgaaacttcaggaagaactctatttgcagggacaccacctactggaactaggcttggatttcttttaccctctttgtcgccctattgtttcacagaacttactccaaattgaagaggatgtagaaggttactaccagaaatttatggcctattatcagtcgcaagatatccaacccgttcagatcctttatcccccacgtttttatgctcagcagaaaagctaactttctaagatagaaatcctcccgaaatgttcatttttatgctaaaatagtaccattggaggattaatcgaaatggtaaaacaacgtaatgaaattgatgaaaaataccaatgggatttgtcgacaatttttgcgacagatcaagcttgggaagaagaagcagctagcttagctgcagatattaaagcagcaagccactatgctggtcatttgttggattcagcgcaaacacttttggatacaaccaatgcttatttggaattgagccgtcgtttagaaaaggtctatgtctatgctcatatgaaaaatgaccaagatacacgagtggctaaataccaagaataccaatcaaaagggatgtctctttatagcttgttaggtgaaacctttgccttctacgagcctgaattcatggccattacggatgagcaatacaagacctttgtgagtgaggttccagctttggaacaatatggtcattattttgatcgtttgctagagaaaaaagaacatgtcttgtctcaaaaagaagaggaattacttgcaggagctggtgagatctttgcggctggtggagaaacttttgaaatcttggacaatgcagatattgttttcccaactgtgcatgatgacaagggcgaagaagttcaattaacacatggaaactatatttcattagtagaatcaaaagatcgtgccgttcgtaaagaagcttacgaaggtctctacaaggtctatgaacagtaccaacatacttatgctaaaaccttgcaaaccaatgtgaaagttcacaacttcaatgccaaagttcgcaaattctcatctgcccgtgaagcggccctttctgaaaactttgtaccagaaagtgtttatgatagcttggtagcagctgtgaacaaacacttgccactcttgcaacgctatgtgcaattgcgttcaaaaattcttggaatctcagacttgaagatgtacgatatgtatacgccattatcagatacagactacaagtttacctatgaagaatcattggccaaagcagaagaagttttggctgttttgggggaggactatctttctcgtgtgaaacgtgccttcagcgaacggtggattgatgtgcatgtcaaccaagggaaacgctcaggtgcctattcaggtggttcttatgataccaatgctttcatgttgttaaactggcaagatacattggataatctcttcaccttggtgcatgaaactggtcacagtatgcattctagctatacccgtgaaacccaaccttatgtctatggggactactcaattttccttgctgaaatcgcctctacaaccaatgaaaatatcttgaccgaacgtctgttagaagaagtagaagacgatgcaactcgttttgctattttgaatcacttcttggatggcttccgtggaacggtcttccgtcaaacccagtttgccgaatttgagcatgccattcataaagcagaccaagaaggtaccgttttgactagtgagttcttgaacaacctttatgcagagctcaatgaaaaatactatggtctttcaaaagaagacaaccctgagatccaatatgaatgggctcggattcctcacttctactataactactatgtcttccaatattcaactggttttgcagcagcttcagctctagctgaaaaaatcgttcatggaacccaagaagatcgtgacaaatatatcgactacttgaaggctggaaactctgattatccactaaatgtcatccgcaaagcaggtgtggatatggaaaaagaagactatttggacgcagcctttgcagtctttgaacgtcgtttgaatgaatttgaagccctagtagaaaaattaggactcgcataagatggtagagtcttatagtaaaaatgccaaccacaatatgcgccgtccagtggtaaaagatgagatcgttgactttatgcgtacgcgtcaaaaaccggtagcgggtgccctaaaggaattagaagcattcgcccgcaaggaaaatattcccatcatcccgcatgaaacggtagcatactttagactactcctacaagccctacaaccaaagaaaatccttgaaattgggacagcaattgggttttcggcgctcttaatggctgaaaatgctcccaatgcacaaattactaccattgatcgtaacgaagaaatgattggctttgccaagaaaaatctagctaaatacgatctgagaaagcaaattaccttgcttgaaggagatgcggtagatgtcttgcgggatttaacagaaacctatgactttgtctttatggactctgctaagtctaagtacatcgtctttttgccacgaattctcgaactcttagaagttgggggagtcgtagtattggatgatatttttcaaggaggagatgttgccaaagacatcatggaagttcgtcgtgggcaacggaccatttatcgaggtcttcaaaacctctttaacgcgactctcaaccatccagatttgaccgctagtttggtgccacttggagatggtattttgatgattcggaaaaatgcagagacggtaaccttgccagatcctagctctttttaggtaaatttaaggtattctctctaatttgtggtaaaatagaggaagtttaaaaaggaacggagaataattttcatgaagaaaaaacttgtagcgggtgctgtgaccttgctatcagtcgtaacactagcagcgtgtgccaatggcacaaacaaagatatcgtgaccatgaaaggggacacgattacagtttctgatttctatgatgaaatcaaaaccaaccaaggtgctcaacaagttcttttccaaatgaccatcaataaagtctttgaaaaagaatatggatcaaaggtttctgataaagaagtcgataaagaattggctaaacaaaagaaacaattaggcaaccaattcgatgcttacttggcgcaacaaggcttgacggaagaaacagcgaagaaacaaatccgtagcaatatgttgttggaatatgcagttagccaagctgctaagaaagatatcaaagagtcagactacaagacagcttttgaatcttatacacctgaggtaacagcacaaattatcaagttggattctgaagacaaagcaaaagaagtattggaagcagctaaagcggaaagtgcagactttgccaaaattgcaaaagataattcaacagataccgctacaaaagacaaaggtggtgaagtcaagttcgattcaggaacagcagatatcccatctcaagtcaaagaagcagcctttaagttggatgaaaacggcatttcagatgtgatcacagtatcagcaggtcaaaactactcagctagctactatattgtcaaattgaataagaagacagaaaaagattctgactggaagaaatacgaaaaacgtttgaaagagatcattgttgacggtcgtaagcaagataccaatttcatccgtagcgttattgcaaaagcgatgaccaatgccaatattaaggttaaagatgatgctttcaaatctactttcaaccaatatttgcaaaatatcggtgttgaaacaagtgatagtaaatcatcatctaaaaaatagttgacggttccttttggaacttgtataatgaaatagttgagaatgaatcattgttactcggaatcagagaagtggcgggggtgcgagccatggaagagaaatgattttgctactcagctgagacaattgcatatgaaaataagaatgacaagttcattgaatgaaggtggtaccgcggttcttcgcccttcgtttggtgacttgtcttttgtttgcgggcagttgtctggagctttttaaaggagatcaaaagatgcgaacctatcaagtgaaacaaaaatttcgattgggtggcgagcggttcgatatcaaagatgagttgggaaatgttgaataccaggttgagggatcttttcttaagattcccaagacttttaccatctatgataagaatggacaagaagtgagccacattactaaaaaaccaatcagccttcttcctaagtttgtggttgagttgaaggatggggacagcttttttatccataaaaagctgacgctcttcagggataggtacgatatcgaagatttgggactgcgggtacaaggaaatatctgggacctagaattcaaattattcgatgatcgggatcaaatcgtcgctgagattagtaaggaactctttcatctaacttctacttaccaagtatcggtgtatgaggatgaatacgctgatttagtcatctcactttgtgtcgctatcgattatgtcgaaatgttagaagctggcgcaaattaagcttaaaaaattaggagacaaatatgaaacaattatctagtgcacaagtccgtcaaatgtggcttgatttctgggcaagcaaaggccactctgtagaaccatctgttagcttggttcctgtaaacgacccaacgcttttatggatcaactcaggggttgccactcttaagaaatacttcgatggaaccatcaaacctgaaaatccacggattaccaatgctcaaaaagctatccgtaccaacgatatcgaaaacgtagggaagactgctcgtcaccataccatgtttgaaatgttggggaacttctctatcggagattacttccgtgatgaagccattacgtgggcttatgagcttttgacaagtccggaatggtttgacttccccaaagacaaactttacatgacctattatcctgacgacaaggattcatacaaccgttggattgctgttggtgtggatccaagtcacttgattccaatcgaagacaacttctgggaaatcggtgcgggaccttctggaccagatacagaaatcttctttgaccgtggagaagcctttgaccctgaaaatatcggtcttcgtctgcttgcagaagatatcgaaaacgaccgttacatcgaaatttggaacattgtcttgtcacaatttaacgctgaccctgctgttcctcgtagcgaatacaaggaattgccacacaagaacattgatacgggcgcaggtttggaacgtttggtagccgttatccaaggggcgaaaacaaactttgaaactgacctcttcatgccaatcatccgtgaagtagaaaagatgtctggtaaaacctatgatccagctggcgataacatgagcttcaaggtgattgctgaccacatccgttcgctttcatttgcgattggagatggagctcttcctggtaatgaaggacgcggctacgttcttcgtcgtctgctccgtcgtgcttccatgcatggtcaaaaattggggattgaaggaaccttcttgtataaattggttccaactgttgggaagatcatggaaagctactacccagaagtacttgaaaaacaagactttatcgaaaaaatcatcaagagtgaagaagagtcatttgctcgtactttgaattctggtcaacactttgcccaaaccatcgttgaagacttgaaatccaaaggtcaaacagtgattgctggtcaagatgtctttaaactttatgatacatacggattcccagtagaattgacagaagaaatcgctgaagaagctggaatgacagtcgatcgtgaaggttttgaagcggctatgaaggaacaacaagaacgggcgcgtgcatctgctgtcaaaggtggatccatggggatgcaaaatgaaacccttcaaaacattacagttgaaagtagcttcaactacaatgccagccaattgccttctaagttggtggctatcgtagcggacaatgcagaagtagaagctgtatctgaagggactgcatcactgatctttgcagaaactccattctacgctgaaatgggtggacaagttgcggaccatggtcaaatcttggatgctgcaggaaatgtcgttgctacagtaaaagatgttcaaaaagcaccaaatggacaaccactccatacggttgaagttcttgcccctcttgccttgaaccaagaatacaccttggctattgataccaatcgtcgtcatcgtgtcatgaagaaccacacagccactcacttgctccatgcggctcttcacaatatccttggtaaccacgcaacccaagcaggatctctcaacgaggtagaattccttcgctttgacttcactcacttccaagccgtaactcctgaagaattgcgcgctattgaacaacaagtcaatgaaaagatttgggaagcgatcgcagtcgaaacgattgaaacagatattgatactgctaaagaaatgggagccatggccctctttggtgaaaaatacggtaaagaagtccgtgttgtcactatcggtgattactctgttgagctctgtggtggtacccacgtaggcaatacttctgaaattggtctcttcaagattgttaaagaagaagggatcggatcaggaactcgtcgtatcttggcagtgactggtaaggaagccttcgaagcttaccgtgaacaagaagatgctctgaaagcagtcgcagcaaccttgaaagcacctcaacttaaggaagtccctcacaaggtggaaggccttcaagaacaactccgtcaattgcaaaaagaaaatgcagaattgaaggaaaaagcagcagcagcggcagcaggtgatgtcttcaagaatgttcaagaagcaaacggacaccgttacattgccagccaagtttctgtatcagatgcaggtgcccttcgtacctttgcagataattggaaacaaaaagactactctgatgtgcttgttcttgtcgcagccatcggtgacaaggtcaacgtccttgtagctagcaagacaaaagatgtgcatgcaggcattgtgatcaaagaattggctccaatcgtcgatggacgtggtggtggtaaaccagacatggccatggcaggaggaagcaaccaagcgaagatccaagaattgttggatgccgtagcaggtaaattgtaagaaagaatagaaataccttagggtaagtatcagattgaatttaaaagactactgataaaatttccttaggtgagtacggacgtcagcgaacttctacgaagttccatgactaattcttgagactaaggtctcaagaattctgagtgcctgagactattaagtctcaggcacttttctcacggcggaaatttccagtatctatttgaatgtttctgaaaattagatgtcaattatattttttcaggaatactttaattcttatttttacggtctttacaagtcctaagcgatcattctcaaaaaatatctacaaaaaaacctttccgtctggaaaggtttttcttcttatagtccgtaattgtaatcgtcatcctgcatggcttctacttcaccgagaaggtaaccatttccgacttgagagaagaagtcgtggttagaagtaccggttgagattccgttcatgacaattgggttaacgtcatctgctgagtcagggaagagcggatcttgtcccaagttcatgagggctttattggcgttgtagcgaaggaaggtcttgacttcctctgtccagcccacaccatcatagaggctctctgtgtagccttcttcgttttcatagagggtgtagagcagatcatacatccactctttgagtttctcttgttcttcttctggtaattcgttaaatccaagttggaacttgtagccgatataggttccgtgaacagattcgtcccgaatgatcaacttgatgatctcagctacgttggctaatttgttgtttccaagatagtagagaggtgtgaagaaaccagaatagaagaggaaggtttcaaggaagacgctggcaactttcttttcaaggggagtcccattgaggtagatttcgttgatgatttctgctttcttttgaaggaaaggattggtgttggtccattcgaaaatctcttcgatttctgacttggtattcaaggtcgaaaagatagaagagtacgacttagcatggactgattccataaattggatgttgttaaagacagcttcttcatggggagtacgaatatctgcacgaagagcctgaacacctgtttcagattgcatggtatctagaagagttaatcccccaaagactttaccaactaggtctttttctttattcgacaactttctccagtcgtccaagtcgtttgacaaagggatacgcgtatccaaccagaattgctctgtcagtttttcccaggtcgatttatcgatgacatcttcgatcgcattccagttaatggctttgtagtatgtttccatttgcatcactttctttttctattcattcaatcgttactattctaccataaattgatagaataccgcacaaaaagtcggcgaaccgacttttgatagctatctaggatagcggattagatgacacagctttcacattggttggcgccaacttctccaccatcatctgtaaaggtacgaacgtagtagatagacttgatacctttgttaaaggcgtagttccgaaggatagacaagtcacgagtggtttgtttgttttctgttttccattcgtagagcccttttggaatgtcgctacgcataaagagggtcagtgaaagaccttgatctacatgctcagttgcagcagcatagacatcgatgacttttctcatatccatgtcgtaggcagaagtgtagtaaggaatcgtttccgttgacaatcctgctgcagggtagtagatcttaccgatttttttctcttggcgttcttcaatccgttgtgtaattgggtggatagaagcagatacgtcattgatgtagctgatagatccatttggtgcgacagccaagcggttttggtggtaaagaccatctgcctgaactttagcacgcagttctgcccaatcctctgcacttgggataaagatatctttaaagagttctttgacgcgatcagattttggtacaaattctccagtcgtgtacttatcaaagtagctaccgttggcatagtcagatttttcaaaattgtggaaggtaacgccacgttcacgcgcgatgttgtttgattctacgagagtccagtagttcatgagcatgaagtagatacttgtgaactcaacagactcaggtgatccgtattcaatcaattgttgcgcaaggtagctgtgaagtcccatagctccaagtccgaacgaatgcgccagtttatttccgtggtcaattgttggaacggccacgatatgagagctatctgtaacgaaggttaaagcacgaaccatggcacgaattgaacgaccaaaatcaggtgaagtcatcatgttgaccacgttagttgaaccaaggttacatgagacgtcggttcccatttggacaaattcttgggcatcgttgatcaagcttggttcctgaacctgtaggatctctgaacacaagttactcatgatgattttcccatcaacagggttagcccggttggctgtatcaatgttgaccacataagggtaaccagattcttgttgcaatttagaaatttcagtttccaaatcacgtgccttaatttttgtcttgcggatatttggattagcgactaactcatcgtatttttcagtgatgtcgatgtagttaaatggtactccgtattcacgttccacagagtatgggctgaagaggtacatttcttcatttttacgagccaactcgtagaacttatctggcacgacgacaccaagtgaaagagtcttaacccgaactttttcatcagcattttctttcttagtagacaggaaggcgatgatgtctgggtggaagacgttgaggtaaacaaccccagccccttgccgttgtcccaattggttagagtaagagaagctatcttcaaagagtttcataacaggtacgaccccagaagctgctccttcataccctttgatcggtgctccggcttcacgaaggttgctgagggaaattccaaccccaccaccgatacgagacagttgaagggcagagttgatagaacgtccgatcgcattcatatcgtcggttacttggatcaagaaacatgaaaccaattctccacggcgggcacgtccagcgtttaagaaagaaggagtagctggttggtagcgttggtggataatttcgtttgcgatgtctcgcgcgatagcttcatttccatctgcaaaatagagagcattgaagaagacacggtcttccatgctttcaagatagtattctccatcatttgttttcagagcatattggttatagaatttataggccgccatgaaggacttgaattggaagttttggtctttgataaattgggccaattcctctaaaaattcaggacggtatttctcgataaatgctctctcaatgtaattgtgctcgagaaggtactgaatcttgtctgtaatcgagtcaaaggttttagtatttggtacaacattttctttaaagaaagcatccaaagcttctttatccttatgaagcatgatttggccgtttactggacggttgatttcattattaagacgaaaatacgtcacatcttcaagagattttaatcccataataatccttttctagttcaaaaaaatgaagaggagaagtcctctctttacaagtaaaaagtctagtgttaggttgctaacgctagaccttattcaagaaaaatactgtgtttattaagaaagttttttcaacttagctggttgaaaaccagaaaatacttcatctggtgtttgaataactggagcagcgttgaaaccgaggctcttaacatgctctacaaattgtggctgttcgtctaagttaatttcgcggtattctacgtgattactatcaaggaatcgcttcgtcattttgcactgaacacaattattttttgaataaatggttaccatttcttttccgttctcctatcgaaatataaatctgtaatcagtataaacaaattccagttacttgtcaacaaaatttaactaaatattgtgcaaagatatggaatggtgtttttagaccacaatatattgtggtttgtaaaggatgcgtatttccaaaaaagaggataggaataggtttctaagcatctttaactaggaataatattcttataaatcaatatcctgtggtttgaaaaataaaatcattgaaaatagagggaaaatttgaccatttaaatagtagaaaattgaaaggttgtttcatatattcctagaaatagcgttaaaatgtattaaaattgcgatttttcgcagtctttttctgtaagtcagtgataaaaatcttgaaaaatatttcaaaagatgatataataccaaattgtaagggttatcaaaaggtagctcaaaactattttttaaaaggagagtccaattatggcttctaaagatttccacattgtggcagaaacaggtatccacgcacgtccagcaactttgttggttcaaactgcaagtaaatttgcatcagacatcactcttgaatacaaaggtaaatcagttaacttgaaatcaatcatgggtgttatgagccttggtgttggtcaaggtgctgacgttgtgatctctgccgaaggtgctgacgctgatgatgctatcgtagctatctcagaaacaatgactaaagaaggattggcttaaaatatgacaaaaatgctaaaaggaattgcagcatctgacggtgttgccgttgctaaggcatatttgctcattcaaccagacttatcatttgagactgtttcagtcgaagatacaagtgcagaagaagctcgtttggatgcagctcttgaagcttcacaaaacgagctttctcttattcgggagaatgcagtagcaagccttggtgaagaagcagcgcaagtttttgatgcgcatatgatggttcttgctgaccctgaaatgattggtcagatcaaagaaacgattcgtacgaaaaaaatcaatgcagaagcaggtttaaaagaagtcactgacatgttcattgcgatctttgaaggtatggaagacaacccatacatgcaagaacgtgcagcagatattcgtgacgttaccaaacgtgtccttgccaacttgcttggtaagaaattgccaaaccctgcttctatcaatgaagaagcgatcgttgtagcgcatgacttgactccatctgatacagcacagttgaacaaaaagtatgtaaaagcttttgttacgaatatcggtggacgtacaagtcactcagctatcatggctcgtacacttgaaatcgcagctgttcttggaacaaataacatcacagaacttgtcaaagatggcgatgttttagctgtttcagggatcactggtgaagtggtgatcaaccctactgaagaacaaattgcagagttcaaagcagctggtgaagcttatgccaaacaaaaagctgaatgggctctccttaaagatgcgaaaacagtgactgctgatggaaaacatttcgaattggctgctaacattggtacacctaaagacgttgaaggtgtaaacgataatggtgcagaagctgttgggctctatcgtacagaattcttatacatggattctcaagacttcccaactgaagatgatcaatacgaagcatacaaagcagttcttgaaggtatgaacggtaaacctgttgtcgttcgtacaatggatatcggtggggataaagaactcccttacttcgatcttcctaaagaaatgaacccattcttaggtttccgtgctttgcgtatctctatttctgagacgggtaaccaaatgttccgtacacaattacgtgctttgcttcgtgcatctgttcacggtaaattgcggatcatgttcccaatggttgctttgttgactgagttccgtacggctaaaggaattctcgaagaagaaaaagctaaattggttgctgaaggggttgctgttgcagatgatatccaagtaggtatcatgattgaaatccctgctgcagctatgcttgctgaccaatttgctaaagaagttgatttcttctcaattggtacaaacgatctgatccaatacacaatggctgctgaccgtatgaacgaacaagtttcttacctttaccaaccatataacccatctatccttcgtttgatcaacaatgtgatcaaagcggctcacgctgaaggtaaatgggctggtatgtgtggtgaaatggctggtgaccaaactgctgttccacttcttgtcggaatgggcttggatgagttctccatgtcagctacatctgtccttcgtacacgtagcttgatgaagaaattggacacagctaaaatgaaagaatacgctgaccgtgcccttactgaatgttcaacaatggaagaagttcttgaactttcaaaagaatacgtgaacgtagactaagaattcaacaagactaagacaaatctgtcttagtcttttcttatatgattctttcttatgaaacaataggaatgtttgtttttattcgtaatcaactagatagtaataaaaatattagtaggattgttcggttttttgtttaaaaatcctaagatatatagtataatcataagtaagattaggaggaaaacgaagagaagaagtaaaaagttcgggatagaaaatgacaaaaattttcctgatatttttacatgattttacaggaataaacttgaaaattaagtgattttatagtaaaataaaaacatgtagaaaacgctttcaaaaacaaaaagaggtgagtttatggatagaagtacagacttatggacgtttggaagaggggataatttccgtcttcaagagtatttaggagctcacaaagagttcgaaggagatcaagaaggttacaccttccgtgtatgggctcccaatgctcaggctgttgatctgattggtgatttcactgattgggaagcccgtaaaattccaatggttcgtaatgaaggaggcgtctgggaagtcttctgtcccgatgcaaaagagggagatatatacaagtacttggtgacgcgacaaaatggtcatcaggtacaaaaaattgatcctctagcgttatggatggaaaagagacccaatacaggatctattattaagaccattccagagaaaaactggaaagatggtctttggcgggcacgccgtaaaaagcttggttttaaggaacgacctgttaatatctatgaggtgcacgcaggatcgtggaaacgaaatgaagatcacagttcctatacctttaaacaactaaaagaagaactgattccttatctggtggagatgaactacactcacgtggaatttatgccagtgatggcccatccattgggactgagctggggatatcagctcatgggttattttgcactcgaacagacttatggtagtccagaagagtttcaagacttcgtggaagaatgccacctcaacaatatcggagtgatcgtggattgggtacctggtcatttcattatcaatgatgatgccttggcttattatgatggaacaccaacttttgagtaccaggatgaacatcgggcccataactatggttggggagctttaaacttcgatttaggaaaaaatcaagtacagtcattcttgatttctagtttgaagttttggattgacacctatcatttagatggaattcgggttgatgccgtgagcaatatgctctatcttgattatgatagtggtccatggacaccaaatattgatgggggaaacctcaactatgaaggggttcatttcctcagacgtttgaatgcggttatcaagaacgaacacccagatgttatgatgattgcagaagaaagttctgctggtcaaaagatcacaggccctgaagaagaaggtggcttagggtttgactataaatggaatatgggttggatgaatgatattctccgcttctatgaggaagacccagtctacaggaaatttgactttaacctggtaacctttagtttcatgtatgcattttctgaaaacttcttactaccattttcacacgatgaagtggtgcatggtaagaagagtttgatgcataagatgtggggagatcggtacaatcaatttgctggactccgtaacctcttgacctatcagatttgccatccaggtaagaaattactctttatgggttcagaatttggtcaatttttggaatggaagtcagaagagcaactggaatggggcaatctagaggatgaaatgaatgctaagatgcgtcgtttcacttctcagctcaatcatttctacaaagaacacaaggaattgtgggagattgatgatagctttgatggcttagagattattgatgcagataaccgggatcagagcgtcttgtctatggttcggaagaatcgtaaaggcgatcttttggtgtgcgtcttcaatatggcaccagtggaacgcaaggactttacgattggtgttcctgtatctgcggtctatgaagaaatttggaatacagaattagaagaatggggaggtgtctggaaagagcacaatccgacagttcagtctcaagagggactgtggaaggattatgaacaaaccttgacctttactttgccggctttaggagctagtatttggaaggtgaaacgcaaggtgcgtaagacaaaatctaaaacatcagataagaaatgacgatcggttgactctatgggagtccaggctttaaaaagaggaagtagtcaatgaagaatgaaatgctcgctttaattcttgccggtgggcaaggaacacgtcttggaaaattaaccaaaaacatcgcaaaacctgcggttcaatttggtgggcgctatcggattatcgattttgcgctatcaaactgcgccaactcaggaattcacaatgttggtgtgattacacagtaccagccacttgcccttaacagccatattgggaatggttccagctggggcttggatggaatcaatacgggtgtgtctattctccaaccttattcagctagtgaaggaaatcgttggtttgaaggaactagccatgccatcctccaaaacatcgactatatcgacagcatcaatccggaatatgtcttgatattatctggggaccacatctataagatggattacgatgatatgcttcaagcgcacaaggataataatgcaagcttaactgttgccgtcctagatgtacctttgaaggaagcaagccgttttggaatcatgaatacagatgccaataatcggattgtcgaatttgaagaaaaaccagctgaaccaaaatctaccaaggcttccatggggatttacatctttgactgggctcgtctgcgcaatatgttggttgctgctgaaaagagtgatatcgatatgtcagacttcggtaaaaatgtcattccaacttatctagaatcaggcgaaagtgtttatgcttatgaattcaatggttattggaaagacgttggtacgattgagtctctttgggaagccaatatggaatatatcgatccaaataatgccttggatagtcgcgatcgtcactggaaaatctattcacgcaaccttatttcaccaccaaacttctttggggaacatggccacgtcgaagattctcttgtcgtcgacggttgttcggtagacggtacagtcaaacactccatcttatcaacagaagctcaagttcgtgaaggagcagttgttgaagatgctgtcgtgatgagcaatgccattatcggtaaaggagctgtcgtaaaacgcgcgattatcggagaaggtgcagtcattgcagacggtgtcgtgattgatggaacagaggaagtacaagttgtcggttacaatgaaaaagtgggggtagcaacagatgaagattgataaatattcagccattttaggaaatacagttgggtatcatgatatgtccactttgaccagccatcgtccggtagcatccctaccgtttggtgggaaataccgcttgattgatttcccgttgtctagtcttgcgaatgctggtattcgtagtgtttttgggatttttcaacaagaaaatattagttcagtctttgaccatattcgttcaggtcgtgagtggggcttgtctactttattgagccactattacctcggaatctataatactccagttgaaaatacaacggtagggccagaatactaccgacaattattgacctatttgaaacggtctggttctaaccaaacagttgctttaaacagtgatgttttgatgaatattgacctcaatcagattttccacctccataataccattgatcgtccgattacagtggtttataaaaagttgcatcttcaaaatatctctgaagtcaatgctgtcttggaaattgatgaaacagaccatgttacagagcaaaaactttttgatggcaaggatcctgatgaagtctacaatatgtcaacagatgtctttattgtggacactccttggttgattgaaaaaatagaagaagaagccaagaaagaatacccacaaaaattgcgctatatcttgcgtgatttggcggtggaatacaatgcttttgcctttgaatatacaggctacctagctaatattcattcggttgaatcctactaccatgcaaacttggatatgttggaaaaccaaaacttcatgaagctcttttcaccaaatcaaaaggtgtatacaaaagtgaagaatgaagagccgacttattattccaagacttcaaatatcaaatcgtcccaatttgcttctggtagtattgtagaaggaaccgttgaacgctctgttgtttcacgccgggtacaccttcatcaaggttcagaagtccgtagtagtcttcttttccctggtgttgtaattcatgaaaatgcaatcgtcgaacatgctatcctggataagggggccgaagtggctgctggtgtgacgattcgtgggacagaagaagcacctgtcgtggttaaaaaaggaacgattgttacagaggatattgtctaatgaaactattatttgttgcagctgaaggagcaccgttttctaaaacaggggggttgggagacgtcattggcgctcttcctaaatccttagctaaaaatggtcatgatgtgcgcgtgatcctcccttactatgatatggtagaggctaagtttggagatcaaatcgaagatgtcttgcattttgagaccaaggttggctggagaagtcaatatgttggtgtgaaacgcattgtgcgcgatggagtcaccttttactttattgataaccaacattatttctttagaggtcatgtttatggtgacttcgatgatggggaacgctttgccttcttccagctcgcggccttagaaacgatggaacgagttgactttattccggatgttcttcatgcccatgattaccatacagctatgattcctttcttgcttaaggaaaaatatcgttggattcaagcttataatgggattaagacagtattgaccatccataatttggaattccaaggtcagtttgacccagggatgttgtgggatctttttggagttggatttgaacgctatgcagatggaacacttcggtggaatgattgcctgaattggatgaaagccggcattctatatgctgaccgtgtgacaaccgtatctcctagttatgcacatgagattatgacttctgaatatggttgtggcttggatcagatccttcggatggagtctggcaaggtgaccggaattgttaacgggattgatgcggatctgtataatcctgaaacggatccactcttgacgcatcacttcagtctctctgatctttcaggtaaagcagctagcaaacgagctcttcaagaacgtgttggtctacctgttcgcgatgatgttcctttgtttgggatcgtctctcgtttgacacgtcaaaaaggttttgatgttgtggtagaagagttgcatcaacttttgcaaaaggatattcagattgtcttgctcggtacaggagatcctggatttgaaaatgcctttgcttggtttggtcaagcctacccagataaactttcagcgaatatcacatttgatgtccaattggctcaagaaatctatgcagcgtcagatgtcttcttgatgccaagccgctttgaaccgtgtggcctttctcaaatgatggccatgcgttatggaacccttcctttagtacatgaagtcggcggacttcgtgatacggttcaaccgtttaatgctgttgatggaagtggaacaggctttagcttcaataatttgtctggctattggtttaactgggcagttgatgaagccttggctgtctactacaatgacaaacaggcttggtatggtcttcaagaacaagctatgacacgtgacttctcatgggatacggctagtcaacgatacaatgatttgtaccaatccttataaatagaactatgatacaaacgcctttcgaggcgtttttttgtgttgctttcttcctataaagaaaacggtttatttttttgagttttagtgcttgctaaaatggaagaaaaaagataagataggtgaaggtaaaaaatctcgggaagttccttgttttcggaaactattttccttctccatataaaataaggctctgacctgaggtttgaatattactatataggaattttaggatgaaaaaagcaaaacaattttttgaaaagaagaccaaatattcgattcggaaattatctgttggtgttggtccggtggccattggagcctttttattaggaggaagcctgttaggagctcgtcctgtcaaagcagatcaggtgaccctacctgctcatgtgcacttaggatatgtgacagaagaggagctaactgctgaagaaaaggcacaggtgattcatgcaatccctgaagagtatcaaaatgaagatactttctatctcgtctataagaagaaggaagcaactcagtcggttcttcctcaaacaggaagtcaggaagttgcccttttggggctaagtctagccactgcttcctttgcggtcctcttactctctaaaaagcaccgaaagaaggttatgggcgtccttttgattggagccatgggacaaagtcttctacttccagttgaagttgcagccctacaaaatcgagtcttgcgcgcctataatcaggatcttgcgatcacatcgagcaaagatcttgaaaatggcgtgattcatattgacggctatgattatgttggctatctgcgctacccgtcagtccaaaagacgagcttacaagagccaaagactatgcaggaaacgaaaacttctgtagaaggaacgatcaaaacaagtacagggattctaccagtggaaccacaagcgcgtgtgaccccagaagtcgctccagcctttcctcaagttgaaaaaccaagcctggaagtctctactgagcctgtaccatttgaaaccgtccaccaagctgatcctacattagccaaagggcaaaccaaggtgctgactgctggccaaaatggggagaggaccatattgacggaagtgggtgtggtagatggacaagaagttcgcagagtagttgaaagcaaggtcactaaagaaccagtttcacaaattcttgctgttgggacaaaagaagatgcccaaccaacccctcaacccaatccttctccagttgtaacggccaaagggacacaagaagaaggtcatgtcggtgaagctcctgttcaaccagagaatccagtctatacaggcgtagtggaagctaagggaacacaagaagaaggccatgttggcgaagctcctgttcaaccagagaacccagcctatacaggagtggtggaagcgaaaggaacacaggaagaaggccatgttggcgaagctcctgttcaaccagagaacccaacctatacaggtgcggtagaagccaagggaacacaggaagaaggccatatcggcgaagcccctattcaaccagagaacccaacctatcaagtaacggaagggacagtaacagagacagaaacggtaatccttccatatgaaacagagtatgtaacggatgccaatcgttacaccgatgaagaaagccttcttcagaaaggtgaggccggtagccaggaaattcgccgtgtttataagacggtcaatggtgagaaaaatggtgagcccctcagcacgacaactgaaacggtaaaagctcctgtgacagaaagaatcagtcgtgggaccaaggcgattgaaggccaaacagaggaagttgcttttgaggagattccatttaagacggtaaccgaacaagatgccaccttgctaaaaggatcagaaacagtttctcaagccggtaaaaatgggaagaagaaaatcaccaaggtttacaagactattaagggggtcaaaacggcggatgctcctacgatttccgaagaagtggtagaacaagcgcaagatcaaatcattaaaaaaggaacaaaggaattagataagccaaccttgaccttgaccaatcttgatcaggaagtgttgaagcgcagtgctaaagctacttatcatttggacaaaccagagggtgtgaccatcaagtctatccaggcggtattgaaaaagggcaatcaagtggttaaaactctgcccctttcagagactgatttagcagttgctttagcagacttagactattacaaggattatacgctcgcaacgaccatggtctatgatcgtggaaatggggatgaagaagaagttctcaaggaagaaccgttgaggattgatcttaaaaaagttgaaatcaaaaacatcaaggaaaccagtctgattagtgtggatgaccaaggacttgagacggatagcagtctcttgactgaaacaccgtctgatgtgaagccatactacttaaaggttaccacccatgataataaggtcacaaaactagccgttgataaaattgaagaagtgacggtagatggcacgaccctttacaaagtaacagccaaagctcctgatctcatccaacggactgcggacaaccaatttagtgaggaatatgtccactatattgcgaaacccaaagcacatgaaggtgatgtctactacaatttcaacgaacttgtaaaagccatgcaagccaatccgactggtacctttaaactgggtagcaatatgaatgcggctaatgtccagccagcagggaaatcctatgtgaccaatgccttcaagggaattttggaaagtacggatggaaatacatttgccatccataacattacaagaccattatttgggaacatcgaaggtggctcggttaagaatctcttgcttgaaaatgtcaatattgacctacctgggacagatcgagtagcaccaatcgcaggtgtcattaaaaacaatgcaactgtcgagaacgttaaagtaacaggaagtgttgtcgggaacaatgacgtagcaggaattgtcaataaaattgatggcagtgggaaggtcagcaatgttgcctttatcgggaaactgcacgctgctgggaacaaaggtggctatctagcgggtgtccttggcgagaactggaaaggtgtcgttgaaaaagcttacgttgacgctgaaatcactggtaacaaagccaaagcggcaggtctcgtttattcctctcaaaatggtgctaataactacacggtcggtaaagaaggggtcctcagaaattcagttgctaaaggttcaattgaactcaaagaagcggttcaatctggtggattactagggaccaactgggccttggggactattgaagacaacatcaccatgatgaaagtcaaaactggtgagatggtcttcggacactcggatatcgatgcagatgattacttcacctattcaagaactaagcgcaattacagtgtggaaggtgtgagtgaagggaaaaaatcctttaacaattcccgcaaaatcccaagtatctcgctggcagaagctgagcagaaaatcgaagcaatgggaatcactgctcatacattcaccagcagcaaaccgattgaagttacgctcaatcaccttattagcaaagacgatcaatacaaggccatcactgcttatgatgctactcgtgagctagcttatcgcaatattgctaaattgcaacctttctacaacaaagaatggattgtcgaccaagggaataaactggctgcaacgagtcctctcttgaccaaggaagtcttgtctgtaacagctatgaagggcaatgattttgtcacggaactagctgatgctgatcacattctgatccattatgcggataagacaaaagatatctttagcattgcaccgaaagactctaaagttaaacaagtcaaagagtacagtgtagcagagctcggtgaagtggtctacacaccgaatatggtggacaaagaccggagcgatctcattagtgccatcgtagggaaattaagtcctgtcgaattgcaatcggatccaatctacacacatcttggtcgaacaggtcctaacaaagtcaatgcgattaagaacctttacctcgaagaaactttcaaagaagtcaaggataatctggctcactttgtcaaacaactggttgaaaaccaagatcatcagttgaatacagatgaagctgccaaacgggccctcatcaagaagattgaggacaacaaggcggccgttctgttggggctttcttacctcaatcgctattatggagtgaagttcgatgatgtcaatctcaaacagctcatgttgttcaagccagacttctatgggaagaatgtcgatgttttagatcgcttgatcgaaattggttcaaaagaagattatatcaaagggactcgtacccacgatgccttccgagaagtcgtggctaaatcgactctttctgggaacctcaatgacttcttgaagtacaatatggagctctttacaagtgagccagacttgaacgattggttcatcaaagcaaccaaagacaatgtctatattgtggagcctgagacgaccaatccagcgttcgcatctgctaagcatagagcctatgagggcttaaacaatgatgttcatggtaaaatgatcttgccactcttgaacttaaaagatgcccatatgttcttgatttcaacctacaataccatggcttatagttcctttgagaaatatggcaagaacacggaagcagaacgaactgccttcaaagctgaaatcgataaggtggctaaaggacaacagaattaccttgatttctggtcacgtctagcaacggataaggttcgcaatcaactcttgaagagcaataatatggttccaacacctgttctcgataaccaaaactataaaggtattagtacagaccgttatggccataccaacagtggcaaagatgtcgctccaatccgtgaattgtatggcccaaccgatcgttaccatgcaacagattggcggatgggagctgtcgctcgaatttacggaaatccttataaagacgactctgtcttctttatggtgaccgatatgatcagtgactttggggtttctgcctttacccacgaaacgacgcacgtcaatgaccgcatggtttacttaggtggttggcggcatcgcgaaggaaccgatatcgaagcctttgctcaagggatgctccaaacaccatccgtatccaatccaaatggggaatacaaggccttaggtctcaacatggcctatgaacgtcctaacgatggaaaccaatggtacaataccaatccaaatgatctcacttcacgcgaggacattgatcgctacatgaagggctataatgacaccctcatgcttttggattacctagaaggagaagctgtcctcaataaaggtagtcaagacttgaacaatgcttggttcaagaaggttgataagcaataccgaggggctaacaccaagaatcaatttgataaggtgcgtcctttgagtgatgaggaaaaagccatcaccttacatacagtagatgacctcatcaccaataacttcatgaccaatcgtggtcctggaaacggggtctataatccatcagactttggttcagcctatgtgactgtaccgatgatgacggggatctatggtgggaacactagtgaaggtgctcctggagctatgtccttcaaacacaataccttcagaatctggggttactatggctatgaaaaaggcttcttagggtatgcttcaaacaaatataaacaagaatccaaacaagcaggtcatgcgactctaggggatgattacatcattcaaaagatttctgatggaacattccgtacccttgaagactggaagaaagcttacttcaatgaagtggtgaccagtgccaaaaatggacttcaggctattgaaattgatgggactacttatagcacttatgatgacttaaaacaagcctttgcaactgctgttgaaaaagatcaagccagcttgaagaatggtgttgtcaaatttgacaatacggtttcactgaaagaaaaaatctttaagaaactacttcaacaaacagacagtttcaaaacgtctatctttaaataatcgaattctcttatctgctgagcaggtgagagttttttttagaagaaaaatgaatagaggtggacaaagcgtctaaaaattaaaagaaatcagtcgtagataggaaaaattatcatattaaaaaaataacgtaatttcattaaaacgcttacttttctaggaaatatttgactattatgtcttttaggagtaaactaataaggtaaaatttataaaaggagaattcatcatgaatttaacatttttaggtctttgtttagcctgctttggtgtatcactggcagaaggtttgatgatgagcagcctattgaaatctgcgtctcgtcaaccagaaattattggtcaattgcgtagcctcttgattcttggtgttgcctttgtcgaaggtactttcttcgtaaccttggttatggccttcattatcaaataagcacttctattttagaaaaggaggtgtcaaaacttggaagaaagtatcactccaacgataactcttggacctgtaacttttaatttgaccctacttgctatgaccttgattgctgttttggtggtttttggctttatttattgggccagccgtaaaatgacgatccgaccaaagggcaaacaaaatgtgctggaatacgcatatgactttgtcgtaggcttcaccaaaggaaatattggggaacattatataaaggactattccttgttcttgtttgttctttttctatttcttttagtggccaataacattggattgatggctaaaatcgaaacgaccaatggttacaatttgtggacatcaccaaccgctaacctgggttatgactttgccttttcatttttgatcaccttaatcgcccatgtagaaggaattcgccgacgtggtgtgaaggaatatttaaaggcttttgtgacacctggatttatgacccccatgaatattttggaagaattaacgaactttgcctccttggcacttcggatcttcggaaatatctttgcgggtgaggtattagcaagcttgctcgtgaacttatcacaccaagctttctattggtatccatttgcctttattggtagcatggcatggactgcattttcaatttttatttcatgtatccaagcctatgtgtttaccatgttgtcatcaatctatattggtaagaaaattaatggtgaagagtaagtagaggaggagtagaagaatgcatgtatcaatgagtgaaattattggtaactttattctcattgctggttccttcctattattaatctttttaataaagaaatttgcatggaacaatatcaatggaattttagaagcgcgtgccaaaaagattacagatgatattgatggagcagaatcagctcgtcaaaaagctgaggaactagcaagtaaacgtgaagaagagttggcaggtagccgcaaagaagctgcgtctattgtcgaaaatgcaaaggaaactgcagaaaagaacaaatctcagatcctttcagaagccactcaagaagcagtacgtttgaaagaaaaagcgcaacaagaaattgcgcataacaaagaagaagcattgaacagtatcaaaggcgatgtggcagatctcactgtcaatcttgccagcaaattgttgagtcaacagctggatgctgaaggtcaacgccaactgatcgatcgctatcttgatgaattaggagaagcctaatggacaaaaagcaactgatggtgattgagaaatatacccagccttttgttcaattggtctttgaaaaaggagaacaagatcttgtctttgaaaaattgacccaaatcaagggcatttttgaggagactggacttgctaacttcttagctcatatcggtgtagaggatgaagagaaagcaaaaagtctaagactttttcaaccctctgattcacaattactcgaccatttgattgaagtggttattctcaatcatcgtgaagccttattttatgacattgtaacgatttgtttggatcagattcaactgttgagcaacgcatttgtcgtcactgttacgacagttgctggtttggatcctgttcaagagcaaaagctagtacccattatcgaaagaaaatttgggattcaagttcgctcgatccaacaaaagatcgatccagatttaattggtggctttgtcgtgacagccaatcataaaacgttggataccagtctcaaacaccaattgcaagttataaaatctaaattgaaatagaaagtggtgtgaattttggcgattaacgcacaagaaatcagcgctttaattaagcaacaaattgaaaatttcaagccaaactttgacgtcactgagacaggtgttgtaacctacattggtgacgggattgcccgtgctcatggtcttgaaaatgccatgagtggtgagttgttgatctttgaaaatggctcatacgggatggcccaaaacttagaaacaacggatgtcgggatcatcattttgggtgatttcacggatattcgtgaaggagactctgtccgtcgtacaggtaaaatcatggaagtccctgcaggggatgccttgattggtcgggttgtcaacccacttggccaaccagtggatggtttgggtgagattgtgacagataaattccgtccagttgaaacaccagctcctggcgttatgcaacggaaatctgtctcagaacccctacaaactggtttgaaagccattgatgccctcgttccaatcggacgtggccaacgggaattgattatcggggaccgtcaaacagggaaaacttcgattgccatcgataccatcttgaaccaaaagggtcaagacatgatctgtatctatgtggcgattggtcaaaaagaatcaacagttcgtacgcaagtagaaactcttcgtaaatacggagccatggattatacgattgtggtaaccgcttcggcttcccaaccgtctccattgctctacttggcaccttatgccggggttgccatggcagaagagttcatgtataacggtaaacacgttttgatcgtctatgatgatttgtcaaaacaagccgtagcctaccgtgaattgtcccttcttcttcgtcgtccaccaggacgtgaagccttcccaggggatgtcttctatctccacagccgtttgttggaacgttcagctaaagtttcagatgaattgggtggtggctctattacagctcttccaatcattgaaacccaagcaggagatatttctgcttatatcgcaaccaacgtgatttcgatcacagatggacaaatcttcttgcaagatagtttgttcaatgctggtattcgtccggccattgatgcaggttcttctgtatcccgtgtagggggagctgcccaaatcaaggctatgaagaaagttgcgggtactcttcgtatcgacctcgcttcataccgtgaattggaagccttcacgaaatttggtagtgacttggatgctgcgactcaagcgaaattgaaccgtggccgccgaacagttgaagtcttgaaacaacccgttcatgaaccattgacagttgaaaaacaagtcgtgatcttgtatgccttgactcatggtttcttagatagtgttccagtagacgatattcttcgtttccaagaagagttgtttgattactttgaagcacattataatcaaatctttgagacgattcgttcgacacatgatcttccagcagaagaagaactggatgcagcccttacagaatttgtcaaccagtcaaatttcaaatagaaataggagtggaagatggcagtttcattaaatgatataaaaaataaaattgcatccactaaaaatactagtcaaattaccaatgccatgcagatggtgtctgctgctaaactcggaaaatcggagcaagcagccaaggattttcaggtttatgctgctaaggtacgtaagttactaacagacttgctccatggacatgaaacagaaaatgctaagtccaatcccatgttggtgagtcggccggtaaaaaagacagcttatatcgtgattacatccgatcgtggtttggtcggaggctacaatgcctccatccttaaaaccatgatggaaatgaaggcagaataccatccaactggagatgactttgaagtgatctgtattggaagtgtcggggcggatttcttccgtgcccgtgggattcagccggtttatgaattgcgtggtttgcctgatcaacctagctttaaggaagttcgtacgatcatttcgaaaacagtccaaatgtatcaggaaggcttgtttgatgagttgtacgtctgttacaaccatcacgtcaacagtttgactagtcaaatgcgggtagaacagatgcttccgattattgatttggaccccaatgaagcagatgaggattatgtattgaatctagaattggaatctagtcgagatgccattttggatcaattgctccctcaatttgctgaaagcatgatctatggtgccattattgatgctaaaacagctgaaaatgctgcggggatgatggccatgcaaactgcaacagacaatgccaagaaagtcattgatgaattaacgattcaatacaaccgtgctcgtcaagcagcgattacacaagaaattactgaaatcgttgctggtgctagcgcccttgaatagttgtcggatacaattttatatacaaaaacagatgctcgaaaaagaacttttgagcagtagaaattacttagaataggagaatgacatgagtttaggcaaaatttctcaggtcgtaggtcccgtcgtagacgttgccttttccgttggagataaacttcctgagatcaataatgcgcttgtagtctataaaaatgaccaacaaaaatcaaaagtcgttcttgaagtagctttggaacttggtgatggggtcgtacggaccattgccatggaatcaactgatggtttaacacgtggaatggaagtcttggacactggtcgtccaatctctgttcctgtcggaaaagaaaccttgggacgtgtcttcaatgttcttggagataccattgacttggatcaaccttttgctgaggatgctcctcgtgactccatccacaaaaaagctccatcctttgacgagctctctacttcagaagaaattcttgaaacagggatcaaggttattgacctcttagccccttatttgaaaggtgggaaggtcggactcttcggtggtgccggagttgggaagaccgtcttgattcaagaattaatccataatattgcccaagaacacggtggtatttctgtatttaccggtgttggggaacggacacgtgaagggaatgacctttactgggaaatgaaagaatctggcgttattgaaaaaacagccatggtctttggacaaatgaatgagccacctggagcacggatgcgtgttgctttgactggtttgaccattgcggaatacttccgtgatgtcgaaggtcaggacgttctcttgtttatcgacaatatcttccgtttcacacaagctggatctgaagtatcagcccttttgggacggatgccatcagccgttggttaccaacctactttggcaactgaaatggggcaattgcaagaacggattacgtcaacgaagaaaggttctgttacatccatccaagccatctatgtgccagccgatgactatacagacccagcgccagcaaccgcctttgcccacttggattcaaccaccaacttggaacgtaaattggtacaattggggatctaccctgcggtggacccattggcatcaagctcacgtgccctttctccagaaatcgtaggagaagaacactacgcagtagcttctgaagtcaaacgcgtccttcaacgttaccatgaattgcaagatatcattgccatcttagggatggatgaattgtctgacgaagaaaagaccttggttgctcgtgctcgccggatccaattcttcttgtcacaaaacttcaacgttgcggaacaatttacaggtcaaccaggttcttatgtaccggttggagaaactgttcgtggctttaaagaaattttggatggaaaatatgaccatcttcctgaagatgccttccgtggtgttggatcgatcgaagatgtgatcgccaaagctgaaaaaatgggattctaagaagaggtgaaagatgagtcaaatgaacgtccaaatcgttacaccggatggactggtttatgatcatcatgccgcatttgtatctgtcaagacaattgatggtgaattagggattttacctcatcatatcaataccattgcggttttggctgtagaccaagtaaaggttcgtcgtgtcgacgatgacaaacatattgattggattgcagtcaatggggggattatcgaagtagctgataatgtcattaccattgttgccgattctgccgaacgtgctcgagatatcgacattagtcgtgcagaacgtgccaaactgcgagctgaaaaagcgattgaagaagccaaagatcagcattcggttgatatggaacgtcgtgctaaaattgctcttcaacgcgccattaaccggattaatgtcggaaatcgtttataacatattaaaaataaggtggaggttttgtcctcaccttatttttgttgggagagaatcaaaagaagaaagtaaggaccaaatatggtataatagctatatgattcaaatgatttttaatctttctagccatctattgtttatcttttttgcctattacctattgttgaacctagttcaatgggaaaagtttttaaaagtaagtgctgaaaatgcggttaaaatccgttttttgatcttaatgatcagcgttggaatagggtttctagctagctcgttttttatcagtgtatatgagatgagtcggcagctatttattggaaatttctaaccacattttataaaaaatatggtatgatagaagtcgtgactttaagaaattggagatcgatctcgtatggaaaaaataatcattaatggtggtaataatcgtctggttggaactgtcaaaatcgaaggagcaaaaaatgctgttcttcctcttcttgctgcaacagttttggcaagtgaaggggtaacaaccttgaaaaatgtacctgttttatcagatgtctatacaatgaacaatgttgttcgtggtttgaatgcacaagtaaccttcaatgaagaagaaaatacagttgtcgtagatgcacaagagaaattgtctgaggaagctccttataaatatgtgagcaagatgcgagcttctatcgttgtcttgggtcctgtcttggcacgcaatggtcatgccaaggtttccatgcctggaggctgtacgatcggcagtcgtccgattgacctccacctgaaaggtctggaagccatgggggctgtaattacccaaacagctggctatattgaagcgaaagcagatcgtctcaagggagcacatatctatatggacttcccatcagtaggtgcgactcaaaatattatgatggccgcaaccttggcagatggggtcactgtgattgaaaatgctgcgcgggaacctgaaattgttgacctagctctcttgctgaataaaatgggagctaatgtcaagggagcaggaactgagaccttgaccatcgttggtgtggagagcttgcacggagcagaccacaatgttgtacaagaccgtattgaagcaggaacttttatgattggggcagccatgacgggtggagatgtcttgatcgaagatgccatttgggaacacaaccgtccgcttctgtctaagatgcaggagatgggtgtgacggtaaccgaagaagaaaatggaattcggattcaatcggatattagtaagcttcgtccagtgaccgttaaaacccttccgtacccaggattcccaacagacatgcaggctcaatttacggctttgatggctatggctaagggtgagtccaccatgattgaaacagtatttgagaatcgtttccagcatttagaagaaatgcgtcggatgggggttcattcagacattatgcgggatacagctcgaatcgtaggaggagaaagtctccaaggggcagaggtcatgtcgactgatttacgagcgagcgcaaccttagtcttgatgggcttggtggctgaaggagagacaaaagtcagcaaattaagccacttagaccgtggttattatcaattccatgagaaattggtggcactaggtgcagacgtgaaacgtgtagaggaagcagacgatgaaaactaatcttcgctatgttggaaaacagctaggaattgtcctcctgttggctgtgattggaatcatcatttttgcagttggtttggtcattggctatggagtgattggagatggaaaaaatccatggtccattctctctccggatacttggtcagagatcattggaaagctaacaggcaaataagatttaaataaaattgagtaaaaaggagagcagcgatcgggtcaatgacccatctagagctgctcttttttggagagaggaatgacaaaacaaatagtaagcaaacgaaccaaacaaaccctagcaggcttcgtggttgcaacagccttagcaattggtggttattattttaatcaaccgtcggtaaaagaagcgacggatcaggttgtttccgtggtgactagtagccaacaagaaacacctagtaaagagttagctagctctgtactaacgaaatctgcccattcacaattggggaatgacttggaatggaacggagctggagcctttgtagttaaggggaatcgaacagatctggatgccagtgtggctagtcaaccctatgcggataacaagacaaaagaagtgaatggaaagaccgtgccgacggttgcgaacgccattatgaccaaggcgactcgccagtatagagatcgcaatgcaacaggaagtggcctaaccgaatggaaacctgcaggttggcatcaggtccacaatctgtcaggcgagtatgaccatgcagtggatcgaggccatctattgggctacgccttgatcggcaatctcaaaggtttcgatgcttcgacaagcaatccccaaaatatcgccgtacaaacggcttggtccaatcaagccaatgatcctcattccactggtcaaaactactatgagaccctggttcgaaaagcactggataagaacaaacgggttcgctatcgggtcaccttgatctacaaccagccagaagatttgattcctttaggttctcagatcgaagctaaatcgagtgatggaacccttgagttcaatgtctttgttcccaatgttcaaagtgggattagcctggattatcagacaggcaaagtaaccgtccatcaataagctagaaagcatggctatttaagttatttttaagaatggggtgttacaattgcataccttctttaagagaaaggagaatgtatgagaaccatttttcgatttttcagaggaatccttcgtatagcatggagtctcttttggggatttttctggaccattgcgatcagttttctcgtcctagtggggatcatctattttacagattctcctagttctggtatggatggagttgggcgagctgcccaaaaggttgtttatcaagtcggcaatttgtttggtgatcagggttttgcatcgcgctttgggatgacacctagctcacagaccacgcagacggacaatcatgagcatagcggtgctcgctgggaaaaagcagaagccacggtctacctggatcccaatatcagtcaaacttttgtaaaagcttatcgggatgctattgaggcttggaaccaaacaggcgcctttacctttaagttggttacaaatgaaaaagaggctaatgtggtcttgacggaaatggataacgcatcggtttctgctgcaggagagactgcttctcagaccaacctcttaaccaaccgcttcacccacatcacagtgcgtctcaatcgccattatcttttaaattatgtctataactatagttatgatcggattgtcaatacagctgagcatgagctaggccatgcgattgggctggatcacactgatggagaatcggtcatgcaaccggccggctctttctacagtattcaggatacagatgtggaagcagtccgacaattatacaaggaagaataagttttaaaatactttctaaaagttctgagcctcaaggggctcaggatttttttgatggctcgtctttccttgtttaatctgaaaaaagatagtaaaatagggacatgattattttacaagccaacaaaattgaacgctcttttgcaggggaggttctttttgataatatcagcctgcaggtggatgaacgggaccggattgccttggtcggaaagaacggagcaggcaagtctacgctcttgaaaatcttggtgggagaagaagagccgacttctggggaaatcaataaaaagcgggatctttctctctcctatctggcccaggatagccgctttgagtcgtccaataccatctacgatgagatgcttcatgtctttgacgacctccgtaaaacggagaaaactttgcggcagatggagcttgagatgggggaaaaaactggggctgacttagaaaagctcatgcaggattatgaccgtttatcggaagaattccgtcaagctggtggctttacctatgaggcagatatccgcgctattcttaacggcttcaagttcgatgagtccatgtggcagatgaagattgaagagctgtctggtgggcaaaatacccgtctcgctctggccaagatgctcttggaaaagccaaatctcttggtgttggatgagccaaccaaccacttggatattgagaccatcgcctggttggaaaattacttggttaattatagcggagctcttctcattgtcagccacgatcgctatttcctcgataaagttgctaccattaccttggacttgaccaagcattctttagatcgctatgtcggcaattactccagctttgtcgagcaaaaggagcaaaaactgctgaccgaagccaagaactacgagaagcaacaaaaagaaatcgcagctctggaagactttgttaatcgcaatttggtgagggcgtcgactaccaagcgagcccagtctcgacgcaagcagttggaaaaaatggagcgcctagacaagcccgaagctgggaccaagtctgcccatatgaccttccattctgataaggcctctggcaatgtcgttttgacagtagaagaggcagctgtcggctatgacgatcaaatcctgtcagagcccatcaatctggatatccgcaagatgaatgcagtcgctattgtgggaccaaatgggatcgggaaatctactcttatcaagtccatcgtcgggcagattccttttatcaagggtgaagctcgttttggggccaatgtcgaggtgggctactatgaccagacccaaagtaaactaacgccacacaacagtgtcttggatgagctctggaatgactttaaactgacgccagaagtagaaattcgcaatcgcctgggagcctttcttttctctggggatgatgtcaagaaaaccgtcggcatgctgtcaggtggagagcgggcgcgtctgctcttggccaagctgtccatggaaaataacaatttcttgattctcgatgagccgactaaccacttggacatcgatagcaaggaagtgctagaaaatgccttgattgattttgatgggaccttgctctttgtcagccacgaccgttactttatcaatcgggtagctactcaagttttggaactctcagaagagggctcaactctttatctaggagactatgactattatctggagaaaaaagctgagttagaagccctagctgcagcacaagcagaagctttgcctgtttcttctacggaggaagtcaccagcaatgactaccacttgcagaagcaaaaccagaaggaactccggaaaattacccgtcgcattgagcaattggaagcagagatggaagagctggaccagaaaatccaagacattaccgaaaccatgcatagcaccaatgatgcagctgacttggttcaactgcaaagcgagctggatcaactaactgtccagcaggaagcggtcatggaagagtgggcagaactgtcagagcaggtggaatagatggacgatcttggaaaagtttttcgcgaatttcgaatcagtaagaattattcattgaaagaagctgcaggagaagcttgctcgacctcccaattatcccgttttgaattgggagagtcggatctggctgcttcacgcttctttgacattttggacaatatccatgtgacgattgagaattttatggataaggccagaaattttcaacaccatgagcatgtcgccttaatggctcagttggttcctctttattacgccaatgatattgcaggttttcaaaaacttcaagaggaggaacttgaaaaagctaagagttcgaccaatcccctctattttgagctgaactggatcctgctacaaggcctcatttgccagagagatgcaaacttctcgatgaagcagcctgatctggacaaggtggcagattatctctttcaaacggaagagtggaccatgtatgagttgatcctctttggcaatctctacagcttttatgaggtggactatgttacacggcttgggagagaagtgatggagcgcgaggatttctacaaagaaattggtcgccatcgaaaactggtcttaattctagccctgaattgttaccagcattgtttagaacaccgttcttttgaaaatgccagctattttgaagcctatgtagaaaagattatcgggaagagcatcaagctctacgaacgcaatatctttcattatctcaagggatttgccctctatcagaaggggcaaacagaaaaagggttgcagcaaatgcaggaagccatgcatatttttgacgtgctgggactgccagagcaggtggcctattatcaagaacactttgataaatttgtaaaaaatgaatgttctaaataggacagtgataaaggagattttatgaaccgacatgcggtccaattaattagtcgtggagctattaacaaaattggaaatatgctctatgattatgggaatagtgtctggctggcctcgatggggactataggaaagacggtattagggatctatcagatttctgagttagtgacagggattctcgtgaatccttttggaggagtgatttcagaccgtttttctcgtcgcaagattttgatgacgaccgacttggtttgtggactcctttgtttggcgatttcttttatcacaaatgatatcttgatgattgcggctcttatttttgccaatattgttcaggccattgcctttggtttttctcgacctgccaataaagccattattaccgaggtagtagagaaagacgagattgtgacctataacgctcacttggagttagtcttacaggttgttagtgtctgttcacctgttttttctttcctagttctacaatttgccagtcttcatatgaccctcttattagatgcactgacctttttcattgcttttgtcctagtggctttccttccgaaagaagaagctaaggttcaagagaggaaacagtttaccgggaaagatattttttctgatatcaaggatgggttagactatatctggcatcagaaagagattttctttctcttgttggtggcttctagcgtcaatttcttttttgcagcttttgagtttttacttcccttctcgaatcgtctatacggggttaaaggagcttatgcgactattttaacgctgggagctattggatctattctaggagcgcttgttgccaataaaatgaaatcaagtatgaaaattctcctgtttttactgatcatggcaggggtcggagtgttcataatgggcttgccccttccgccttatctttccttttcaggaaatctggtctgtgaattttttgtgaccattttcgacatccacgtttttacccaagtacaaaccaaggtggaagatgattatctggggagagtcttgagcacaatttatactttggctgttctctttatgcccatcgccaaagggttgatgacttggttgccaagtgtccgcatggaatcatttctcttgattggagctggagttattctcttttcactcttggctcagctagtagctaagcaacttcaatcgaaagaacagtagggatcctttgataaaattgtaaatcattgtttttcccaaataggggacaaaatgaaaacctctttcatgaactgatacaatagtttcagaaaatgaaggaggttttttatgaatcgacatgctatccagttgattgctcgtggggcgatcaatagaatgggaaatatgctctatgactatgggaacagtgtttggctggcctcgatggggacggtaggaaagacagtgttggggatctatcagatttctgaactcgtcacctccattctaatcaatccatttggtggcgtgatctcagaccgtttttcccgtcgcaagattttgatgacgaccgacttggtttgtggtctcctttgtttgggcatttcctttatcaggaatgatcgttggatgattgtagccctgattgttgccaatattgtccaggccattgccttcgctttttctagaactgccaataaagctattatcacagaagttgtagagaaagaagagattgtgacctataatgcccacttggagttggtcttacaggttgttggtgtcagctctcctgtgttctctttccttgttttacaatttgccagtctccatgcgaccctcttgctggatgcgctaacttttttcatcgcctttattctggtggcattccttccgaaagaagaagccaaggttcaggaaaagaaacggtttacgggaaaagatattttttcggatatgaaagatggactagactatatctggcatcagaaagagattttcttcctcctcttggtggcttccagtgtcaatttcttttttgcagcttttgagtttttactccccttttccaatcgcctttacggggtcaaaggagcctatgcgaccatcttaaccttgggtgctatcggctctatcatcggagccttgatcgccaataaatttaaatcaagcatggaaatgcttctcttcttattgattttaacaggagtgggagtgcttatgatgggcttgcctcttccgcctcttctttccttttctggaaatttggtctgtgaactctttatgacgatttttaatatccacttttttacccaagtgcaaaccaaggtggaaggagactatctgggcagggtcttaagcacgatttttaccctagccattctctttatgccggtggctaaaggtttgatgacctggttaccaagtgttcgagtagaatcctttctcctgataggagctggtgtcatcctcttttcactcctagcacaagtagtcgccaagaaattacaagcaaaagaaggtacatcagcatgaaaaaagcaccgatcggtgcttttttagttgttttctttttcttctgtcttgatttctttcttttcttcttccagttgcttttgagtgctcttgagttctttttttagggagaagccctttgaaaaattaaccaaggtcatgacgaatgcacccaagaggacacagagcaagatcagaatgatcaaaggcaatttaaattgaaccaagaggaaatttacggtgaccgtttgcatatttgcaagggaaataccagcaatcaataagatggaaagtaataaagcaatgtagtgtagatttcttttattcatcatcatctccttattgttcagtcggagccttgcttttcacatcagcgtattcttccggctgctctaggcttagaatctcctcataagccggtagggaaaggtccttgccatatttattttttagggcagtgctcactaggcgataggccaaattggcatttcgggacaagataggaccgtggaagtagctgccaaagacgttcttataatgaaccccttcgcacccatcttctttgttgttcccatttccatagacgaccttacccagcggtttttcatcctccgctaagaaggtccgaccttggtggttctcaaaaccataataggtttcgttaaattcttcgttatggattttgatatcaccgatatagcggttgttgacttggttgagcgtatagtggcccatgataccaagtccctcaatacgtttgccagaagcttcaatgtagtattggcctagaagctgaaagccaccacagatagccaggaccacgccatcgtcatgaatgaagcgttcgaggtcttcttttttatctggtaggtcctcagatacaatggtctgctcgtagtcttgcccgccaccgaaaaaggcgatatcgtaggcatcagggtcgaaccggtctttgagagagacgatatcaacagtgacatgggctccaagcttttccgcaacgtacttgagcatgaggatattcccattgtccccataagtattcattaagttgccatagagatgggcaatgcgcaggctgtagggatactgtgcctgatcagaagattctagggaagtataagtcattagtgcatctccttttcaatcaggtgttcttgggccaagagttcacggaattctagcatggctgtataggtagctaaaatgtaagcatgaggggtttcctgttgctggatacgttggaagacctcttttaattcagccatttctgtgatcttttctgcgggatagccagtgacccgaagtcgccgagcaatctcagagtggcgcaccccgccagcattgatctctggaatgtccatctggatgatttgctcaaagtccgcatcccagatccagcttgtatcaattccgtctgcataattcgcattgagaagaacggacaggctgaagggataaggggctagtttgatcatttcaatggcttgggtcgcaccaaccggattcttaatcaggaccaaggtacattccttatccccaatcttaaaggtttcctgacgaccaaagacagcgcggctgcgatcaaatccttgcttaatgacttcaggttgcactccaaagaatccagcaactgagacagctgctaaggcattgtagatgttgtaaagaccaccgatattgatgtggtaatcttgcccttggatccggaagttggaagagcgctgggttaaagagaggagatccgatacggcataggtcagaggtggccggtgaaaaccacagtgctcacagatataatctcccaggttggcataggtattgagcttgtacttgaggatgttgtggcaatgcgggcacaggattccttccgtattgtaatgggctagttgtggctctgatttttctgtatcaaatccataatattggatcggattggataaggtctgactatgaaagagcggactatctccatttaacagaaccgtcgcagttgggaccttgtgaatggcatccaaaatcatttggtaggtcgtatagatctcaccgtagcggtccatctggtctcggaaaatattggtgaccacaaaaaggctcggctggatataatcacaaatacgagagaggctggcctcgtcaatttcaagtactgcgatcggtcgatttgatttcgaatgcttagctcgtaagaaggtcgttgtaatcccagagatcatattggccccgcttggattggtcaaaatcggtccgaaagcttcttggagaatacctacggttagtgcagtggtcagagtttttccgtttgtccctgtaatcacaacaatctcatagtttttggccagttgactgagaatatctttatcaaatttgagggctactttacctggtagggttgatccccgccccattttttctagaatagagccggaaagctttcctgccagaaggcccaaggttgtatttatcttcataaatcatattttatcataaaaagcatcagaaggttacagaaaaatctgttgaaacatgttataataaggtgatgtcttttagagaagtggtaggtatgagaatatgaatattcaacagtttacaaatccacaattttggaccagtttgttcccgaattggtggagtgttgttatcaatatcatcgatattgccctggtggcctggttgttgtattttttgatcaaggccatcgtagggaccaagatcatgattttggttcgtggagttattatctttttcttggtgcagtttttagccaatttcttagggctcacgactatttcatggctgatcaatcaagtgattacctatggggttattgccctggttgtgattttctcccctgagattcggattggtttagagcgtctgggtcgggcgacagaattctttacgacgagtgaagtcagtcaggaagagaagatggtgcaggcctatgttaaggcagtggcttatatgagcccacgtaagattggtgccttggtagctattcaaggagctagaactcttcaggaatatatttccacagggattcctctagatgcagatatttcaggagaattgctgattaatatcttcattcctaatacgcccttgcatgatggagccgtcattgtccgcaatgacaaaatcgctgtttcttgtgcttatctacccttgactgaaaacactgagatttcaaaagagtttggaacgcgtcaccgtgcagccattggcttgtctgaagtctctgatgcttttacatttgtggtatcagaagaaacgggtggcatctctgtgacctacaacggaaccttccgtcatgatttaactttagaagagtttgagacggaattgagagccttcttggttcctgaagagaataaaacgagtagttggaaagagcgtctatttgggagggcgacaaaatgagatcgaaaaaagaatttctttatgttttcgcctccgtcttattgtcctttatcttatttatcaatgcgtcttcctttaattttcaaaataatagtagcgcaagacaagtgagttcagagacctataccaataccttgaccaatattccaattgatgccaagtacaatgacaagacatattttgtcagtggtttaacatcagaggtaacggtctttctgaaaggttcaaatcgggttgcccttgctagtgagatgcaaccgggcactcggaagtttcgagtggtggctgatcttcgtaaggccaaggaaggtaccgtcgaagttcctttgattgtagaagatcttccagccggtttgacagcaactgtagagcctcagaaagtttcagtaaaaatcgggaagaaagcgaaaaaatcatttgctgtcagggctacgatcccggacaatcaaattgtggatgggataacagtaacggatatttctcttgaaaccaccaaggtagaagtgatcagtgatcaagaaaccttaagtcgcattgatcatgtcgaagctgtctttccatccagtgagatcattagtggaaattatagcggaaccatttccttaaatgcagtggatgcccaaggaaatgttctaccaggtctggtcaagccgagtgaaacacggattaaagtgaccacaaagagtagctcgtctacgtcaagctctagcagttcgtcgtcgacctcttccagttcaagtaattagaaagtaaaaaaaggtaattaagaatgggtaaatattttggaacggacggtgtccgtggagaagcaaatgtagaattaacgccagaattggcttttaaactaggccgtttcggtggctatgtgttgagccaacatgaagaagaaacacccttggtatttgttggacgtgatacacgtatttctggtgaaatgttagagcatgccttaattgctgggctcttatctgttgggattcgcgtctacaagttgggtgtgattgcaacaccaggtgttgcttatctagttcgtacggaaaaagccagcgccggagttatgatttctgctagccacaatccagccttggacaatggcatcaaattctttggtggtgatggcttcaaattggatgatgatcgcgaacttgaaattgaagccttgcttgatgcggctgaagatacgcttccacgtccaagtgcacaaggtttaggaactgtcatggaatatccagaaggcttgcgtaagtatcaagaattccttgtatcgacaggcgttcagctcgaaggcatgcacgtagtcttagatacagcaaatggtgcagcctctactagtgcgcgtcaaatctttgcagatttgggagctcaattgaccgtcatcggtgaaaacccagatggtttgaacatcaatgatggggttggttctactcacccagatcatttgcaagagaaagtaaaagaagtaggcgcagcgattggtcttgcctttgacggagacagcgatcgcttgattgctgttgatgaaaatggagagatcgtagacggagataagatcatgtacatcatcggttcttatctttcaagcaagggcttgctcgaaaaaaatacgatcgtcacaaccgtcatgtccaatctcggcttccacaaggcattagatgcaaagggaattcaaaaagaaatcacagctgtcggagaccgctatgtggtcgaagaaatgcgcaagtctggttacaatcttggtggtgaacaatctggtcacgtagtcatcatggattacaacacaactggtgatggtcaattaacaggagttcaattgactaaaatcatgcaagaaactggcaagaaattatctgaattggctgctgaagtaaccatttatccacaaaaactcgtcaatatccgggttgaaaatagcatgaaagacaaggcgatggaagtgcctgccattcgtgaaatcattgaaaaaatggaggcggaaatggcaggaaatggtcgcatcctcgtgcgcccaagtggaacggaacccctccttcgtgtgatggcagaagcaccaacccatgaagaagtggactactatgtggataccattgctacagttgtccaagcagaaattggactataaagtctaggtgtgagctttgtgtgttcaaaagtttgggaccattcttatcgatccagactatgagtgttcctatctttcactcagaaaaacacagctaaagataaaaagagatcggacttctgtctggtctttttgtgtaggctcgatttgaaaaatcccctatttcgtggtaaaatagagctaatgaatttatagtaatcgaggtattagaagtggcttttggagataacggaaaacgtaaaaaaacaccatttgaaatgatcacgatggttgttattgtgattatgttgattgtaacggttggtgcaatttttgcaaccgcaattggtgctctttcttattaagacgcacacagaaataaaggaaatcatctatttatgagtatgtttttagatacagccaagattaaggtcaaggctggaaatggtggcgatggcatggtggcctttcgccgtgaaaaatatgtcccaaatggcggaccttggggtggtgatggaggtcgtggaggcaacgtcatcttcgtagtagacgaaggcttgcgcactctgatggacttccgttataaccggcatttcaaagcccaaaatggggaaaaaggaatgaccaaagggatgcacggacggggagcagaagatctctatgtacgagtccctcaaggaacgaccgtccgagatgctgagactggcaaggtcattacagacctagttgaaaatggacaagagtacattgtcgcccacggtggtcgtggcggacgtggaaatattcgttttgccactccaaagaatccagctccagagatttctgagaatggggaacctggtcaggaacgcgaactcgaattagaactcaaggtcttggcagacgttggtttggttggcttcccttctgttggaaaatcaacccttctcagtgtgatcacttcagccaaaccaaagattggagcttatcatttcactaccatcgttccaaatttgggcatggttcggacgccatcaggtgaatcgtttgcagtcgcagaccttcctggattgattgaaggagctagccaaggagtcggactaggaacccagttccttcgccacatcgagcgcacccgtgttatcttgcatgttattgatatgtcagcgagtgaaggacgcgacccttatgaagactatgttcaaattaataaagagcttgaaacctacaatcttcgtttgatggaacgtcctcagattatcgtggcaaataagatggatatgccagagagccaagaaaacttgaaagaattcaagaagaaattggcagccaattacgatgagtttgatgaactgccacagatcttcccgatctctagtttggcgcatcaaggtttggacaacttgttagaagcaacggcagaattgttagacaaaacaccagaattcctcttgtattcagaagacgaaatggcccaagaagaagtctactatggctttgatgaagaccagccagcctttgacatcagtcgggatgacgatgccgcttgggtcttgtctggtgaaagacttgaaaaactctttaatatgacgaattttgatcgtgatgaagcggtcatgaaatttgctcgtcaattgcgtggcatgggtgttgatgaagctctccgtgcgcgtggggcaaaagatggcgatatcgtccggatcggtaaatttgaatttgagtttgtggattaggatagatcccgagtggatcaaggattccaaataagaagtgaggctttttcagtgggagataaaccaatatcttttcgagatgaaaatggaaattttgtttcagcagccgatgtttggaatgctgaaaaactagaagaactctttaatacgctaaatcctaagcgaaaattgcgtttacaaagggaaaaattagcaaaagaaaaccagcagaagtaaatagacttggagaatactatggcaaaaacaattcatacagataaagcacccgcagcaattggaccttatgttcaagggaaaatcgtagggaatcttctctttgcaagtggacaagttcccttgtcacctgaaacaggcgaaatcattggcgaaaccatccaagaacaaacagagcaagtcttaaagaacattggggctattttggaagaggctgggacagactttgaccacgtggtgaaaaccacttgtttcttaagtgatatgaatgactttgtaccttttaatgaggtctataaaacagtctttaccacagagtttccagctcggtctgctgttgaagtagcacgcctgccacgtgatgtgaaggttgaaattgaagttattgcggaaatcaaagcctaataactattcaaagacaaaaagacagagtggagagcaggaaactgtaggccactctgttttatttatgggaggagaaaatgacagaaagtaagattcaactggtcatggtaacagggatgagtggtgctggaaagaccgtcgccatccaatcgtttgaggatttgggttactttaccatcgataatatgccaccggcgctcttgctgaaatttattgagctcatgcgccacagcccagataacaataaattagccgttgttgtggatatgcggagccgttcttttttcaatgaaattcgcaccattttggatgaattggacaaccaagaagacctcgatttcaaggtcttgttcttggatgctacggacagtgagttggtagcacgatacaaggaaactcgtcgtagtcacccactagcggcagatggccgtgtcttagatgggattaccctagagcgcgaactcttatcaccattaaaaaatattagtcaaaatgtggtggatacgactgagttgacgcctcgtaatctgagaaaaacgatcgcagaacaatttgccagtcaagacaatcagccagattttcgggttgaggtcatgtcatttgggtttaaatatggccttccgatcgatgctgaccttgtctttgacgtgcgttttcttccaaacccctactacaaattggaacttcggaatttaaccggtcaagatccagcagtctatgattacgtcatggatcaccctgaatcagaggagttttacagtcatcttcatgacttgatcgttcctattttaccgtcctataaacgtgagggtaaatccgttctcaccatcgctatgggctgtaccggtgggcaacaccgttcagtagcctttgcagagcgcttagcgcatgatttagaaaaaaattggcaggtcaattgcagtcatagagacaaggacagacggaaagaaacggtgaatcgctcatgagaaaacctaaagtaaccgttattggaggcggaacagggatttctgttattctcgatagtctgagaaagaaaccggtcgatattactgctattgtaaccgttgcagatgatggtgggagttcaggtgaattgcggaagaacatccaaaaattgacaccacctggagatcttcgaaatgtgctggttgccatgtcagatatgcctcgtttttatgagaaggtctttcaataccgctttgctgacgatgatggccctttggctggacaccctttgggaaacttgatcattgcagggatttcggagatgcaaggctcgacctataatgccatgcagttgttaaccaaattctttcatacgaccggcaagatctatccttccagtgatagtcccttgacccttcatgccgtttttcaagatggaaaagaagtggtaggagaaagccacattgccaactacaccggcatgattgatcatgtttatgtgaccaatacctttgatcaagagcgtccaaaagctagtaagaaagtggtggaagctattcttgaaagtgatatggttgtcttgggtcctggttcgctctttacctcgatccttcctaatttgatgatcgatgagattgggaaagccatccttgaaaccaaggctcaggtagcctatgtttgtaacatcatgacccaaagaggagaaaccgagcatttcacagatagtgaccacgttgccgttcttcataaacatttgggagagaagttcatcgataccgtccttgtcaatatcaatcaggttcccgcagcttacatgaacagtaataaatttgatgaatacttggtgcaggtagagcacgattttaaggggttgcactcgcaagttccccaagtaatttcttccgatttcttaaagctggtcaatggaggagcctttcatgatggtgaaaaagtggtcgaagagctgatgcagatcgtgcaggtgagaaaatgagttttacggttcgtgtaaaagaagaattattgtctctcaagcgatttgaaaagagtgaattggctgccattatcaagatgtctggaagtcttgggatttcaatggggggcttgacgctctcggtaacaacagaaaatgccaagattgcccgccatatctatgaattgttgcatcatttctatgaggcaaaatcggatatccgccaccaccaaaaaaccaatttgaaaaaaaatcgtgtctatacagtattcttggatgaaaaggtggaagagattctagctgacttacatttggcagatgccttctttgggattgagacaggtattgatgctagtgttttagaagatgaagcagctagtcgtgcttatcttcggggggcctttctgtcgagtggttccatcaaggatcctgaaaaagggaagtaccagctggaaattcattctgtttatacagaccacgcggaaggaattgcccttctcatgcaaggatttttactagatgcgaaaaccatcgagcggaaaaaaggagtggtgacctatctgcaacgagcggaagatattattgattttctcattgtggtagaggccatgcaagccatgcaggaatttgaatctatcaaggtcatgagagagacgcgcaatgacctcaatcgggccaataatgccgagatggccaacattcagcggacagtcacagctagcatgaaaaccattaataatattagtaaaattgtggatacggtcggtctaggaagcttaccaagtgacctgcaagaagttgcctatatccggatgaaccatccagattattccatccagcagatcgctgatagtttgcaaaaacctatttcaaaaagcggtgtcaatcaccgcttgcgtaagatcaataagatcgcagacgatttagacaaataaaaaaggccaaaggccttttttagattgaagaaactattttaaagtaaaataagttaatcgattctaaaagtaagtaaaaatgagttcctatttttagaatgaatcaagaaaatacaaaaactttccgctgtgagaaaagtgcctgaaacatattgtttcaggcactcggaattattgagcccttgggctcaataattagtcatggaacttctacgaagttcgctgacgtccgtactcacttaaggaaagttttttaaaaagactttatcctcattatgaaagtccaaaggccttttttattataaactggttgaatgcgttggttggactttcttatctggatagatgtagttgatggcattgtttacggctgttggagcttcccccagacctgtagcgatgagatcaatctttccttcgtagaagcagcagtctccacaggcataaattccaggaaggctggtttcttgtttttggttcaccttgattttatggcgttgcaattctacaccccattctttcaagtttccgattgaagatttaaagccatagttgacaaataagtgatcaatcgggaggagttcagtttcatcggatttaacttttgtgatttcaaggtgtgtggcatgaccattttctccaatcaagcgactaggaacaaatggtgttttgatgttgacagaagattgtttgagttcttctacactatgttccaaggcgcggaagttgtcccgacggtgaatgattgtagttgaagcaatcttgtcaaaagcaagagcccagtccacagcagagtccccaccaccaaggacggtcacctgctgtccttcatattgctggatgtttgaaacatggtagtggacgttatcaaagtcttcagctccctcaatgtcaagggcacgtggtttaaaggcaccgccacccatagcaatgatgactgctttagactgatgtacttggcgagaagtagtgatagtgaagaggtcaccttctttttgaattttttctacagtttcattgaggaagattggtgtatcaaatcgtttgacttgctcgatcaagcgattgctcaattcttcaccagttaaattagtaaatccaggtacatcgaggatatttttttctggatagagaatggctggttgccctccaagttgaggtaaggaatcaatcagtttgactttaacttggcgcatattgccataaaaagcagcaaacagaccaactggtccgcccccaacaatcgtaatatcataaatttctgacatggtatctccttcagggttttctttgtttccattgtatcataaaataggaggaatgaaaaagtcggaaaaaagtaaatggaatgaaggttaagaagactagaaaaatttcaaaatatcttgacaggatctttcaagtatgataaaataattaagattttaggcttgaagggagtgaaaaatatgtcaaaaacagtagtacgtaagaatgaatctcttgacgatgctcttcgtcgtttcaaacgtgcggttactaaagctggtactcttcaagaaacacgcaaacgtgaattctatgaaaaaccttctgtaaaacgtaaacgtaaatcagaagcagctcgtaaacgtaaaaaattctaattgaatacaggaacagacttcggtctgttttttgtttctcttaaacaagaaagacaaaaaagccgaccttctacttagaagatcggatcttttaatgattatttgttagcaagcaagtcgcggatttctgcaagcaactcttcttgggttggagcaggagcttcttcttcgacagcttcttctttttttccaaagttttgagctttttcagcagctttaacaacgaagaaaagtactgtaccgataacaaggaagttgatcatagcgctcaagaagctaccgtatgcaacaccgttccatgacaattgtgcaatattttgaacacgagcagctttcaaagcagggttcaaaataagtggtgtaatgatatcgttaacgagtgatgttacgatagctccaaaagcagctccaatgataactgcgacagcaagatcaacaacgtttccacgaaggaggaaggcttttaattctttcaacataacgtttatatgtcctttcataataattttatactaagttagtataacggaaaaatatttgactgacaaaaaatatgcctaatttttttaaattagtgataaaggttgaaaatcttttcttttctgtgtgaaataggtaggaaaaaatttacttttactaacttttagtataaaatataaagtgataatctatggtaaaatggaggcactgtttatggttgataaagagctcattgcagaaattaaaaacagtgtaaacattgttgaagtcattggagaagttgtttccttgaccaaggctggccgtaattttttaggcctgtgtccttttcatggtgaaaagactccttcctttaatgtcgttgaagacaaacagttttaccattgtttcggatgtggtcgctctggagatgtctttaagtttattgaggactatcggggagtttcctttatggatgcggtccagattgtagcagaaaaagctggcattgcgcttcagtaccaggcaaggtcaaatcaacaggcacaggtgaatccccatcaagaactttatgagattcatcaggaagctagtaaattttatcaagccattctgatgacgacaaagatgggagaagaagcgcgaaactatctgcatgaacgtggtctgaccgatgaagtgatccgacattttcaattgggcttagcaccagcagaagggaattatctctatcgaaatctctctgaaaaattttcggagaaagttattacagattcgggtttgtttacaatttcagatactggaacggttttcgatgcctttcaggatcggatcatgtttcccctaacggatgatagcggacgagtcattgctttttcaggtagattatggaaaaaaatagatgatgggagtcatcacgctaagtataagaatagtcgcagtacacgtctatttaataaaagctatgaactctatcatttagatcaggctaaggcaagcgcaaaaaagcaacatgaaatgtatatcatggaaggctttatggatgtcattgcggcttatcgagctgggattgaaaatgctgttgcctccatggggacagcattgacacctgagcacgtccagcacttgtctcgtttttcaaaaaaagtggttttgacttatgatggggataaggcagggcttgaagcgacagctaaggccttggatgttctgcaagatctggagttggaaattgtccgtatccctgatcagatggacccagatgagtacctcaaaaaaacttccccagaagatctagcaggccttttgaaaaattctcggatcagtaaggttgaattcttgatgcaatactggaaaccccagtatattgagaatctacaagcgcagattgagtttgtagaaaagatcgcgcctataatcgcccagacgcgctccattacagcgcaaaatacctatatttataaactggcggatttattaccagattttgattatttgcagattgagcagattgtcaataatagtcgcttgcatcaacggcaagaggctcaaagtagtggacaatcaagaacgtcgaatttttcagtagatttattacccaatcgtgggatgacgcgcttgatcaaggcggaaaatcatttgttgagtaggatgaaggattttccaatggtgttgaatgattatcgtttgcgacctgatttttcctttgatacaccggaactacagatcttgtaccaattgctctgtcaaaatggagaagttacttcgcaggatttgtccgagcaagcagaaggggttcaacacgcctggtaccgcatgttagaagaagatttaccggaagaaatagcggatggtgaattagaagaagtagaagcgacacgcactcgtgagctccttcgcaaagaaagtcaacaaattggaaataaggtgaaagaagcttcctcgactggggatgcggaaagagctttattggaactcgagcgcttaatcgctcaaaaaagaagaatggagtaggaatggctaaagaacaaaaagatattacaacattggacgttcaaattgcagaatttatccgcagtcataagcaaagtgggactgctacagatgatgaaattaatgatcagttggttattcctttcacactggatgcagatggtattgaagatctcctgcaaagaattcaagatgcagggatttcgatcactgataaagatggcaacccaagtgcgcgtgtgttgaacaatgaagaagagccagaattgtcagatgaagaattgcttggaagcaactctgctaaggtcaatgacccagtacggatgtacttgaaagaaattggggttgttcctcttttgaccaatgaggaagaacaagaattagccattttggtagaacaaggtgacttggaagccaagcaacgtctagctgaggctaaccttcgtttggttgtttccattgcgaaacgctacgttggtcgtgggatgcaatttttggacttgatccaagaagggaacatgggcttgatgaaggcggttgataagtttgactataccaaagggttcaagttctccacttatgccacttggtggatccgtcaggccatcactcgtgctattgcagaccaagcgcgtaccattcggattcctgtccatatggtggaaaccatcaataagttggttcgtgaacaacgcaatcttttgcaagaattgggacaagatccaacacctgaacaaattgctgaacgcatggatatgacgccagacaaagtgcgtgaaatcttaaagattgcccaagaacccgtttctcttgaaaccccaatcggtgaagaggacgatagccatttgggagattttatcgaagatgaagtgattgaaaatccagtagactacactacacgtgtggttctacgtgaacaattggatgaagttcttgataccctgacagaccgtgaagaaaatgttttgcgtcttcgttttggtctcgatgatggaaaaatgcggactttggaagatgtggggaaagtcttcaacgtgacccgtgaacggatccgtcagatcgaagccaaagcccttcgcaaactccgccacccaagcagaagcaaaccattgcgtgactttatagaggattaaaaatgtccagtggacatttttaacccgagccgaaaaattcggaagcgaggaaggtccgggggacctttttaacccgagccaagaaattctatcgagagtaaaatagcaaaaaaagggagtcatatggcatatacaactgagcaaattgaagaaattaaaaataaaatcttaaatgctttggaagaggtaatcgatcctgagcttgggattgacattgtcaatttaggtcttgtctacgagatccattttgacggtgaaactggagcaaccatcattgatatgaccctaacgaccatggggtgtccattagcggatcttctgacagatcagattcatgatgttttagcagaagtagaagaagtgacatctgtggatgtgaagttggtctggtaccctgcttggacggttgaaaagatgagccgctatgcacggatcgcacttggaattagttaaaaattctattcatcaaaacaaatcagaggttggggcttccctaacctctgatttgtttatccctgtttttttgaacaagcatttacaaattcttagcaatttttcagataaagttgcaatcatcaaggggacaaggtataatagcataaatagaaaataaaggagatttacatgaatcagtatcctttggtctacttggaccatgtgacaaagaattatgggcatgaagttgctctgatggatgttagtctgaacattcaacctggccgtattattggcctcttgggtcctaatggtagtgggaaaacgaccattattaaattgattaatggtttgttgcaaccaagccttggaaatatctatattcatgggcaattaccatcccctgcttctaaaaaagttgtttcctatttgcctgatacaacttatctgaatgaaaatatgaaaattatcgatgcaattcgctatttccaagatttttatgcagattttaatgtccaacgtgcttaccaattgctcaacgatttacatttgcaaccaaatcaaaaattgaacagcctttcaaaagggaacaaggaaaaagtacaattgattttggtgatgagtcgtgaagctgacttgtatgttcttgatgaaccaatcggtggggttgacccagcggcgcgtgattatattttgcggaccataattcaaaatagacgtccaaactcttctgttttgatttccactcacttgattgctgatattgagcaagttttggatgaagcgattttcatcaaccaaggaagaatcctcttgcatgaaaatacgactgttatgcgcaatcaatacggaaaatcaatcgatgagatcttccgtgatcaattccgtgtttattaggaggaccctatgtttggtaaattattaaaatacgaatttaagtcaacaagtaaatggtatctgttgattactttgatcgcactaggtttgtcagtgattacaggtgttattggtggaagtgctacaaacggttttgtggatatggaaaccaatagtatgcaaattataacggggactcttgggattctcatttttggaggagtcattggtctttatcttagtaactactatattattatccgtcgtttctattccaacttatacggacgtgaaggttacttgacctggacccttccagctagccctcatgcgattattttgtctaaatttgtgggagctttagtagcgagtctttactgcctattccttctatttttgagtggtttcatcacaattattgtgatgggcgctgtcattggacaagacatctctcctgtatttagtattatcgctgaggcttttagtcattctattgcttattggattatcgtttggtggatttttaccacagcttcagggatcttcctattttatgtatcgatcgcacttggccaactcttccaaaatcgtcgtggatttaaggctattctgtttttctttcttttgtgcattgttttaagtatcattggtacagcagtcaatccattaaaagattcatatgctgtcgggtctgcattggtttatggaaatattgatgattttggacctaacttcatcccaggtcttatctatgaagtcatcaagattgtttctatgtacttcaccattcactatatcagcaagtacaagttgaatcttcaataataacatgaaattgagcgaggatgttctagtaagaaatttccttgttcaattttttattttgcatttttagctacattttgatatactaattgtattcgttttggggtcgttacggattcgacaggcattatgaggtatattttgcaactcatctagcggatgtaaaacgccagttaaatataactgcaaaaaataataattcttacgctttagctgcctaaacaccagcaagcgtgacccgattcgaatcgctcgtgtttgatgacaggtcttaattttagcgagatacgatctaactttgtctaggagttagataagagattgatagactcgcaactacagggcttgagttatgtgtcatgtagctgttaaactaagacataacctatggttgtagacaaatatgctggcaggtgtttggacgtgggttcgactcccaccggctccatatttttattcatggaagattactcaagaggcttaagaggccgtgttggaaacgcggtaggcgtgtaaaagcgtgcgtgggttcgaatcccatgtcttccgttgttgagacatcattgtgtagcagtggtgtttttttgtacaaaaaagagttccaaaaggagttatcaaaaatagacgagtgagggaggagaaaacagtgattgcacagctagataccaaatcagtctatacctttatggaaagccttgtaaccataaaagactatgtccaagtggctaaaagcatgggttatgacgcattgggaatcatggatgtagataatttgtatggtgcttatgaatttatcgaagcctgtcaggcccacaagctcagccctttggtcggtttagaagttggactagaggcagacaatgaaacaattccgtttcggatgattgccctgtcaacgagggggtatcagaatctgatgaaaatgtcgaccctcaaaatgatggggaaaaacaattgggaggatgtgaagcaccttacagaaggagtagcagtcattgtcccagcgccttttgccagtgaagacttgccgcttggtctagattacttcatcggagtttttgccgatacgccggtccaagagtttagccaccctgtgctccctcttcatactgtgcgtttttttgaggaggaagatgtggaagccatgcagatgctggcagccatcaaggacaatcaaagcttgacggaaacagggccaaatgatcctacaacagtcctaaaaaaacctcaggatttaaagaatgatttcgcagagagatttcctcaagccatcacaaatctggaaaaacttgcccaaggaattcaatacgacattgatactcagttgaaattgcctcgcttcaatcctcagaaactagctgttgaggaactgagagaattagcccaagcgggtcttcttcgaaagaacttgaccaatccggtctatcaagaacgtctagatcatgaattagacattattcaccaaatgggctttgatgattatttcttgattgtctgggaccttcttcgtttcggacggagtcaaggctattatatgggaatgggacgtgggtctgctgtaggctcactggtagcctatgccctagagattacagggattgatcctgtggagaagaacctcctgttcgagcgctttttaaatgtggagcgctacaccatgccggatattgatattgatattcctgatatttatcgtccagaatttatccgctatgtgagagaccgttacgggagttaccatgcagctcagatcgtgaccttttcaacctttggggccaaacaagccattcgagatgtctttaaacgttttggagtaccagagtacgaattaacctccattaccaagcggattggctttagggatacactgacgacagcttatgaacagaatctagcttttcgacaagtaattcatagtcgagcagaatttgaacgtggctttgaaattgccaaaagaatagaaggccaacctagacaaacctcgatccacgcggctggggttgtgatgagtgaccaggatttgacagatcacattcctctcaagtacggagaagatatgtttgtcacccagtatgatgcccatgcggttgaagccaatggtctgttgaagatggactttttgggtctgcgaaatttaacctttgttcagaaaatgaaggaagcagtttatgaaaagtaccaagaggagatcgtgattgaagccattgatttagaagatccagcaaccttggccttgtttgctgctggggataccaagggcattttccaatttgaacaggctggagccattcgcctcttgagacgtgtgagacccaatcatttcgaagaagtggtagcgaccacctctctcaatcgtccaggagctagtgattacattgataatttcgtcaaaagaaagcacggccaggaaaaagttgacattctggatccagcgattgaagaaatcttaaggcccacttatgggatcatgctctaccaagagcaggttatgcaggttgcccaacgttttgcaggctttagcctggggaaagccgatattttacgtcgggctatgggtaaaaaaaatgcagctgaaatgcataagatggaagacgattttgttgtaggtgctcttaaacttggtcatacggaagaaaaagctaaagaggtctttgcaatcatggaaaaattcgcaggatatgggtttaaccgttcccatgcctatgcctattctgccttggcttttcagatggcctatttcaaggtccattatccagatgttttctttgatgtcatgctcaattattcaagcagcgattatctgactgatgctctccagtttgattttaaagtcgcaccattatccatcaataccatcccttacagagataagttccaggatcgaaaaatctacttgggaatgaaaaatattaagggactcccgagagatttagcgtattggatcattgataatcgtccttttgaaagtgtcgaagattttattttacgactccccaatcagtatcataaattacctttgttaacacctttagtggagcttggattattcgacatttttgaaaaaaatagacgcaaggtgcttcacaatttgccgaatttgtttgtctttgctgatgagctaggaagtttgtttgcggattctaactattcctggacagaagtggaagactttagccaggctgaaaaatatgagaaggaagaggccattattggcatcgggctcagtacccacccattggttgcgattgggcaaacgagtccctacgagatccaaccaatttctcaactcatacaaggagagcaggcacgcattctcattgaggtacaaagcattcgaactattcgaaccaagtcgggagatctcatggctttcttacaagtcagtgataccaagaaaaaattggatgtgacccttttccctgaaacctacaatcgattttcctccttgataaaagaaggtggcttttattacttgacagggaagatacaagagcgtgatgggcgcttgcagatgattctagcagaggcgcaactagcgaccaatgagaaattctggattcaactggctaaccataaagatgataaaatgatgctttctatcttaaaaaaatatccagggccatatcctgtaatattacgctatgaagaagagaagaaaaccttgcaattgaagggctatacagtccagaaaaacaaagaattagaagttgaactagagaatcttgttatgaaaacgatttatcggtaaaaactgcgaaaaatacgagaattttagttttctttgtgttataattacgtagaatgtaaaagaaaaaaaggagcaaacaacgaaatgaaacgtattgctgttttaactagtggtggagatgcccctggtatgaacgctgccatccgtgcagttgttcgtcaagcaatttcagaaggaatggaagttttcggtatctatgatggatacgcgggaatggttgctggtaaaatccagcctcttgatgcctcatctgttggagatattatttcccgcggtggtactttccttcactcagcacgttaccctgaattcgcacaacgcgaaggtcaattaaaagggatcgagcaattgaagaaacatggaatcgaaggtgttgtcgttattggtggagatggttcttaccatggtgcgatgcgcttgactgagcttggattcccagctgttggtcttcctggtacgatcgacaatgatatcgtcggaactgattttacaattggttttgatactgcagtcacaactgcaatggacgcgatcgataagatccgtgatacttcttctagtcaccatcgtaccttcgttatcgaagtcatgggacgtaatgctggtgatatcgctctttgggctggtatcgcttcaggtgcggatgaaattatcatccctgaagaaggattcaagatcgagaacgttgttgaaagtatcaaagaaggttacgcaaaaggtcgtacccacaatatcatcgttttagctgaaggtgtgatgtctgcagatgaatttggtaaagctttgaaagcagctggtgatgaaagtgaccttcgtgtaactgagcttggccacattcaacgtggtggttcaccaactgcgcgtgaccgtgttcttgcttcacgtatgggatcacacgctgttaaattgttgaaacaaggaatcggtggtgtagccgttggaatccgtaatgaaaaaatggttgaaaacccaatccttggtaaagcagaagaaggagccctctttagcttgacagaagatggtaagattgtggtaaacaatccacataaagctgatcttggtcttgccgagttgaaccgtagcttgtcttcaatctaattttatttcataaattcgttaaccttgtcttaaaaagacagatatatataaaaggagtcgtatatcatgaacaaacgtgttaaaatcgttgcaactttaggtcctgcggtcgaaatccgtggtggtaagaaatttggcgaagatggatactggggcgaaaaacttgacgttgaagcttcagctcaaaatatcgcgaaattgatcgaagctggtgcaaatgttttccgtttcaacttctcacatggtgaccatgctgaacaaggtgaacgtatggccactgttaaacgtgcagaagaaatcgctggtaaaaaagttggttaccttcttgatacaaaaggtcctgaaattcgtactgaattgttcgagggtgaagcaaaagaatattcttacaaaactggtgaaacgattcgtgttgcgacaaaacaaggaattaaatcaactcgtgatgtgattgcgttgaacgttgccggagctcttgacatctttgatgatgttgaagtgggtcaccaagtattggtagacgatggtaaattgggtcttcgcgttatcgaaaaagatgctgctaaacgtgaatttgttgttaaagttgaaaacgatggtatcatcgcaaaacaaaaaggtgtaaacattcctaatacgaaaattcctttcccagctcttgctgatcgcgataatgatgatatccgtttcggtttgaaacaaggtatcaacttcatcgcgatctcatttgtacgtactgcaaaagacgttcaagaagttcgtgcaatctgtgaagaaactgggaacagccatgttcaattgtttgcgaagatcgaaaaccaacaaggtatcgaaaacttggatgaaatcattgaagtaactgatggtatcatgatcgctcgtggtgacatgggtattgaagtaccattcgaaatggttccagtttatcaaaagatgatcacttctaaagtaaacgctgctggtaaagttgttatcactgcaacaaacatgcttgaaacaatgactgaaaaaccacgtgcaactcgttctgaagtatctgacgtcttcaacgccgttatcgatggtactgatgctacaatgctttctggtgaatctgcaaatggtaaatacccagttgaatctgtagctactatggcgaaaatcgatatgaacgctcaaactcttcttaacgaatacggacgtttgaattcagattcatttgaacgtaactctaagacagaagttatggcgtcagctgttaaagatgctacaaactcaatggatatcaaattggtcgttactcttactaagactggtcacactgcacgtttgatttctaaataccgtccaaatgctgatatcttggccttgacatttgatgaattgactgaacgtggattgatgttgaactggggtgttatcccaatgttgacagatgctccatcatcaactgacgatatgttcgaaatcgcagaacgtaaagcggtagaagcaggtcttgtacaatctggtgacgatatcgttatcgttgcaggtgtaccacttggtgaggcagttcgtacaaacacaatgcgtatccgtacagtacgctagtagacaattatatcttaaagccttgctggttggtccgaaaggattgaccgcgaggtttttctttatactaacggctttttctctagatgtgactattgataagaatcacttccaaagatttctttctctttttttaagacagaaaacatggtataataaataaaaaggaagggagacattcatgccaaggagagatttaattagaaatgtcatcattgtcgctgtactggttttagcactgatcttattacgaatctttgtatttcatccatttagtatcaatgataagatggccaatgcttctgtgaaaaatggagatcttgtggtagcgactagaaatgctcaggtagatcgcagtgatctggtcttatacaaggtcggtggaaaagaataccttggacgtgtcattgccaaagaaaacgatgaagtcagctacgtagatgacgtcctctatttgaatggacaggcaacaccagaaccttacctaaataaaatgctgaataaacacttagcggctccaacgagtaatgggtattatacggatgatttctttttatcagagttaaaagggaccaaggctggtcgtgtaccatcggatacttatctggtcttaaatgataaccgtggggatacagaagatagtcgtgagtttggttatatccataaaaatcagatcgaaggagtcgtgaatctgcgtctctatcctcttaataaatttggatttataaaagtagaagaatagccgaaaggctatttttttttataaatatcaaaatgaactagttttttttccatttttgtgataagatgttcattaaataattttttaggaggagaatgctatgcagtatgctttggaaattttaccaagtttgttaaagggagcaagcctcaccttgcaagtctttgctttcgtattgattttatcgattccactaggaatcgtcgttgcttttttgcttcaattgcgatcaaagctcctgcatgtactcctaacaatttatatctggatcatgcgaggaactcctcttttgcttcagttgatctttatttattacgtccttccaagtattgggattcggattgatcgcttgcctgcagctattacagccttcaccctcaattatgcggcctattttgcagaaatcttccgtggagggattgttgccattccgacaggtcagtatgaggcggccaaggtcttaaaactgagttcatggcaaacgattcgctacattattttgcctcaggtggtgaagatcgttcttccaagtgtcttcaatgaagtcatgtccttgatcaaagatacttccttggtctatgctctgggaatcagtgatttgatcctcgcaagtcggacggcagccaatcgtgatgccagcctagcacctatgtttttagcgggagctatttatttaatcctcattgggatcgtgaccatcattgctaagcgagttgaaaagaacatttcatattataaataggaggagaagcatatgttagaattaaaacaaatttcgaaacgttttggggataagcagatcttatcagatttcaatcttctcgttcctgaaaaacaaatcgtcgccattgttggaccttctggaggaggaaagaccaccttgcttcgcatgctagctggtcttgaaaccattgattctggtcagatcgtctataatggtgaaaatttgcctctagatgccttagaaaaacgaaatcttctcggttttgtcttccaggactttcaattatttccacacttatcggtcatggaaaacctgatcttgtcccctatcaagaccatgaatgtgactaaggaagaagcgagtaaaaaagccatgagcttactggagcgtttgggactcgaacaacatgcggatgcttatccattctctctatctggtggtcagaagcaacgggtggcattggctcgtgctatgatgatcgatccagaaattattggctatgatgagccaacttcggccttggatccagaattgcgattagaagttgagaagttaatcttgcaaaaccgggaactggggatgactcagatcgttgttacccatgatattccatttgcagaagcaattgcggatgttcttctcaaggttgagcctaaataggaggagactatgaaacgagtaataccatggctgctaggtgtccttagtctcgttcttctgactgcctgtggacagacagtgagtgatcctaaagtggacaactggcaaaaataccaaaaagagcagtccatcacgattggttttgataatactttcgttcccatgggctttgagcaaaaagatgggagctacgctggttttgatattgatttggccaatcaagtctttgaatcttatgggattcatgtcaactggcaacccattgattgggatatgaaagagacggaactgaataatgggaccattgatgccatctggaatggatattctgcaacagatgaacgtcgggaaagtgttgcttttaccaagccctatttgaaaaatgaacaagtcttggtcactaagaaagcttctgggatccaatcagtcgatgggatgaaagagaaacgattaggtgcccagaccggatcttccggctatatggattttgaagccaatcctaaaatcttaaaaaataaggttaaaaatcaaaaagctacccaataccagagtttcaacgaggcgctgatcgatcttcagaatgatcggatcgatggcctcttaatcgaccgtgtctatgccaactattatctgcaaacggaaggaattttaaaagactacaatgtctttcctgtcggttttgatactgaatcctttgcggtaggggtgcgcaaggcggataaaaccttgaagaaaaaaattgatgaagccttcgtaaaactctatcaaaagggccagttccaaaagatctctaagaagtggttcggaacggatgtagcaacagacgatatcaagtaaaaaagagagtgggacagaaatcggtcattcgttagaattcgatttcgtcgtcccacctccgcacagttgagtagggctgtaaaagctgatgaaatcagcgtagtagagcccactcaaccactgcgtcttgctcgataatccaaaaataattgagaggctaggacttttgtcccagcctctttagtctgttttattagtaatttgatggaaaatcttctgccaagtttcgtggcgacgccagagactggtatgaatttgaccgtctagctcatagcgtatgagtttggttttttgactgatggactccagttcaaagttttggaattgaacttggtcgcttgcgagagcctctattaattctgccttgttgtgttcgtgaccggtatcgtcaatcaaggtataattatccgctagcaatgtatcaaactcttgcttagcatagaggcgtttttcataggtcaagagtttcttttcaacgttttcgatcagctcatcttcaggaattgagctaggttctacatggacgtcaatgtcaaagactccaaattcttctttcaggagatcctcgacttcttctgtgatcgcatggctttcatagacggaaagatcgggattcatctccaagacaacgtccagatagatattgcttccgtaggtccgtccgcgttggtatttcacacgcgcaatcttagggagttttaaaatagctttttcgtaatcttcgaggaggctatcatcaaagccgtctgaaagactaaaggaagattccataaagatatcgtaggctgttttgaggataaagaaggtgatgatgatggctacgattttatcgacaattggatagttaaaagcactagcagcgatcgcgatcgacgttccaagagatgtgacgacgtctgaaagattgtcttttgcggctgcttttaaggcttttgatttggctcgttttgctaagcgaagattgtagaaataaacacctagcatgacaagagctgaaaccactccgacaccagcaccgagtggatcaatgctaactgtttcattgctgaagatcttttggagggtatcgcgtaagacatcaaaaccgacataaaacataatgatggaggtgactagactagctagatcctcaattttccagtgaccaaacttgtgatcacggtcagctggttggcgagcgagacgaatcccgatgagcagggcagcattgctgataatatctgataagttgttaaatccatcggctaccaaactagaggagtgaagcagatggccagtagctaattttgctgaagaaagtagtaaataggctaaaatactgatgatggcaccacgttcggccagttttaagttactgtatggtttttccaaaatttcctcctacaacctcggatatgaacctgttttctttaagctactattatatcgtttttggaagggaaattcaaatgagtccttttttaaaagaagctaggctggtttttgtggtataatagaacgattgaatgaatgaggagtatgagatgaatcctttattgaatggtatgaatgatcgccaagcagaggcggtccaaacgacagaaggtcccctcttgattatggcgggggctggttcgggtaagacacgtgtcttgacccaccgcatcgcttacttaatcgatgaaaaaatggtcaatccttggaatattttggccattacctttaccaataaagccgctcgggagatgaaggagcgggcttatcagttgaatccagccacccaagattgcttgattgccaccttccactccatgtgtgtgcgtattctccgtcgagatgcggatcacattggctacaatcgtaactttaccattgtcgacccaggtgagcaacgaaccttgatgaagcggattttgaagtccttgaatttggatcctaagaaatggaatgaacggaccatcttggggactatctccaatgccaaaaatgacctgatcgatgaagtggcctacgtcgcccaagcgggggatatgtatacccagatcgtcgctaagtgctatgaggcttaccaaaaggaactccgtcagtcggaagcagtggactttgatgatttgatcatgctgaccctgcgtctttttgatcagcatccagatgtactgacctactaccagcagaagttccaatatatccacgtggatgagtaccaagataccaaccatgcccaataccagttggtcaaactcttggcttcacgttttaaaaatatctgtgtcgttggggatgcggaccagtctatttacggctggcggggagcggatatgcagaatatcctggactttgaaaaggattatcctgatgccaaggtcgtcctcctagaagagaattaccgttcgaccaagacgatcttacaagcagccaatgatgtcatcaaaaacaatcgccaccgccgtccgaagaatctctggacacaaaatgaagacggggaagagattgtctattaccgggctaatgacgagcaggatgaagcagtctttgttgctaaaacgattgaagagcttagtcgcgaagctggctacaaacaccgtgattttgcggttctctatcggaccaatgcccagtcacggaccattgaagaagcgctactcaagtctaacattccctacaccatggtagggggcaccaagttctacagccggaaggaaattcgggatgtcattgcttatctgaacttgattgccaacctcagtgacaatatcagttttgagcgcattatcaatgaacctaagcgaggaatcgggccaggtacagtggataagattcgtgattttgctcaaatgcaagagtcctcactcctggatgcttcagccaatatcatgctctctggcatcaaaggaaaggccgctcaagccatctgggactttgccaatctcattcttgatttgagagaaagattggaccagctgaccattacagagttggtcgaagaagtccttgacaagacaggctacatgacagccctaaccaatcagggaaatttggaaagtcaggcccgcatcgagaatatccaagagttcctatctgttaccaagaattttgatgaaaatggagagaccgtcgaagacgaatcaggtgtggataccttgagtcgtttcttgaacgatttggctttgattgccgatacagacgatggggctcaagaaacttcagaagtcaccttgatgactcttcatgcagccaagggattggagttcccagtcgtcttcttgattgggatggaagaaaatgtctttcctcttagtcgtgcggctgaggatccagatgaattggaagaagagcgtcgcttggcttatgtagggatcacgcgggcagagaaggttctcttcttgaccaatgctaactcacgtttgctctttggacggaccagctacaatcgtccgacgcgtttcatcaatgaaattagctcgaatttattaacctaccaaggattagcccgtccagtcaacactagctttaaggcttcttatagcaatggaggcggaacgacctttggaaaaggcatgagcctgtcacaagcccttcaagagcgcaagagacaagcagccccaaatgctctcacgtcatcaagtctaccttttggtaatagtaaccgttctagcgccaaagaaagcgtcgcttggtccattggtgatattgccattcacaagaagtggggcgaagggactgtcctagaagtatctggtagtggtagtacccaagaactcaagatcaacttcccagaagtgggtctcaaaaaactcttggccagtgtcgcgccaattgagaagaaataagtggagaccagtaagctaagtccactgtttcagattataaacaagcaacatcttttcagaaatctaaagttattactgaatgagactattgaaaaaatattttggaactagtgcaaaatagattgagacttttcgccgtgaggaaagcatcagaaacgcattagtttctggtgatcggtagatttgagacgtaaggctcaaatctaaggtatggaatcccaaagggagtcgctaccgtccgtcctcacttaaggaaagtctctatagagaaatgaatattcagttaaaaccagcaagcttcgtttgctggttttgattttactggtggcatgatataatatactaagaatagagaaagaggcatgctatgaacgaaatcaagtgccccaactgtggggaagtttttacagtcaatgaaagtcaatacagcgaactcttgtcacaggtacggacagcagagtttgacaaggaaattcatgagcggattcgccaagagttggcattagcagagcaaaaggcccttaatgagcaacaagagaagttagccaagaaggatcaagaaattgcccagttacaaaaccagattcaacagtttgatactgaaaaagaattggccaaaaaagaggtggagcaaaccgctaaccatagcctgctagagaaagaaaaagaagtgcaagcactagaaaatcagttggctaccttgcgcttggagcatgagaaccaactgcaaaagacactctctgacttggagaaagaaagggatcaggttaaaaatcagcttctcttacaagaaaaagaaaacgagctttctctgacttctgttaagcaaaactatgaagcccaacttaaggcagccaatgaacaggtcgaattctacaagaatttcaaggcccaacagtcgaccaaagcaatcggagaaagcctggaacagtatgcggagagtgagttcaacaaggttcgcagttttgccttcccaaatgcctattttgaaaaggacaacaaggtctctgcgcgtgggtctaaaggcgactttatcttccgcgagtgtgatgaaaatggagtggagattatctccattatgttcgagatgaaaaatgaagcagacgggaccgaaaagaaacacaagaatgcagacttctacaaagagttggacaaggaccgtcgagaaaagaactgtgaatatgcggttttagtgactatgcttgaggcagataacgactacttcaacacagggattgtcgatgtcagccatgagtatgagaagatgtatgtcgtccgtcctcagttctttatccagatcattgggctcctgcggaatgcggcccttaattcccttaaatacaagcaggaattggcgcttgtccgtgaacaaaatatcgacatcacccactttgaagaagacctggatgccttcaaagtagcctttgctaagaactacaattcggcttctgtcaactttggcaaggccatcgatgaaatcgacaaagccatcaagcggatggaagaagtcaagaaattcttgaccacatcagaaaatcaactccgacttgccaataataaattggatgatgtttccgttaaaaaattgacacggaagaatccaaccatgaaggctaagtttgatgccttgaaggaagactaggaggatcctatgcagatacgaaaagcaaccataaaagatgctgaagccctactgtctttatacgaagacttgggctatccaacgactgcttctaagctgtctcgacgtttagaaatgattctttctcaaccacattatggctgtcttctagctgaaagaaacggaaaaattttaggtttcttaggttatgcaaaactcttcttttttgaagcagatggatcttactatcgtattttagctttgtcagttgcaaaagaaacaagacgacaaggaattgctagtaggctaatcgatgaattgaaaaaacaagcggtaaaagaaggagttgaggcactggctttaaatagtggattaaccgctgaacgaaatgctgcacatcagttttatcaggcagttggatttgaaaaagtgactgctggctttgccttgcatttaaaaactcaacataagtaaatcatgaaaaaatagtagagggaacgaagtaatgtcttcaacaaaagggaaaaccttatattttaacgaaaagagcatggactatgtgacatttggaaaaggaaaggaccctctagtaattataccaggattgggggatgggcttcagaccgttaaaggaaaggcccagctcttttccctctcttatcgtctacttgctaagcgctataaaatctacgttttttctcgaatcaatgagctgagacagggttatacgacgcgggatatggcagcagatgtagcagaagcaatggagacactaaacctagataccgcctatttcatggggatttcacaaggtggaatgattgcccaatggttggtggcagatttccctgaaaaggttcaaaagctcatcttagctgtgaccactgcaaaacctagtcaacttgctagagaacgaattgaacattggcaacaacttagtcaatctggaaattttaagcatctcatgctggatattgcaaagcactcctacacgcaaaagagctatcaaaagtggcggttgctttataatatcatgggtcgcttgggacgaattaaggatgggaaacgaattaccattcagtctcagtcttgcctcactcacgatagccttgaggtcttaaaggaaattcagtgtccgactctgatccttggtgcccttgaagatgatgtgatcggtgtgaaggactccaaggaactggcaaaagcgatttcgggttgtcagctccttatccttaagcattctggccatgctctttatgaagaaaataaagcatttcaagaggctgtctgtggattcttaaactaaaaaacgctggaaaaattccagcgtttcagattgaagacaaagcatccttaaaaactttccttaggtgaggtcggacgtcagcgaacttctacgaagttccatgacttagttttgaacctaaagtttcaaaactcccgagtgcttgaaacgtaatgtttcaagcacttttctcacagcggaaagttttataactgcttaaatgactcaagaaaatagaaatcatttttttgagaaattatctagctatttatgtaaaaaatagtttgtctatattctaaaacgctggaatattttccagctttttttatgctatttaaatcgcaaagagatcgtttaggttttctgccatggttgggtgggtaaagatttgttttgcgatgtaagtataagggatcttgttgtccatcgccatggtgatcaggttgataagttcgcctgcagcttctccaaagagcgtcgctccaaggatttctttggtttctgggttgaccacggctttgaaggcccctcggaggtctgcattgacatgtccgcgtggcatggcagcaactggcaattctttaacggcaactggaagccctttgtcacgtgcttcttgctcggtcaagccgacttgggccagtggaggagcaataaagagtgttgtcgcataatttctacgagtttcgagattgtagctaccatcgcctgtaaggtagttgaagacaatacggaagtcatcgagtgacatgtaagtgaattgaggaccaccattgacatccccaactgcaaagacaccagggacgctggtttccaaatgacggttgacttggatcgctccacgatcagtgacttggatatctgtgttttcaagaccaagtccagctgtgtttggtttacgtcctgttgcgtagagaaggatatcaaactcgaagtctcccctatctgtgacaaccgttaagctgttttggccatctttgatttcttgggtatgaacgccttgcatgaattgaataccgtcttcttcaaggtagccttttgcaagagctgcaatacttggctcgatccgtggcaagaatgtttcagaagcatccaataccgttacttggctgcccaaggtattatagagatgagcaaattccaatccgataggtccaccgccaaggacgccgaggcgtttaggtaggttttccaaacgttgaataccggttgaatccaccgcaaatttactttcagccaatcctgggattggaaggacatttggcaccgcaccagtattaataataatggtttcagctgtcaattcttccttttcatctccagcttgaatttcgatgaccttgttggaaaggaaacgagcagtcgcgtcgataatgtctacaccagttccagcaatggttgcgtagttcttgccattgagacgagtagtgaccgcatttttttcattcatggcttgctcaaaatccaagcctttttctgcggcaacaatcaaggtcttagtgggaatacaagcgatattgatacaagtaccaccgtacatagatttgctcttttcaatcagagcgacttttttaccttggcttgataatttcgccgcaagtgttttaccagctttaccaaatccaatcacaataacatcatacattaacatatgttacaccttctttcggtttctattgtatcaaacccattttaaaaagtctgaaatctgctacgggattttttaggagctcatgggaagggggaaagagggacaagaagtctcgtttcgtggtataataaagggtcggtggcccggatggtcacacaatcagttagaaagagcaaatcagatggacggaattatcaatgtaaaaaaagaagcgggcatgacttcacatgatgtggtctttaaactgcgaaaaatcctaggaaccaagaagatcggtcatgggggaacgttggatccagatgtggtaggagtgcttccgattgcagttggaaaagcgacccggatggtcgaatttatgcaagatgaaggcaagatctatgaaggagaaatcactttgggattttctaccacgacggaggatgccagcggggaagtcgtagagcggaccccagtggaagcacctttagatgcagcagaggtcgatcgcatgattgcccaaatggtgggagaaatggagcaagtaccacctatgtattccgctgtcaaggtcaatggacgtaagctctatgaatatgcgcgggcaggagaagaagtggaacgccctgtccggcaggtaaccatttatgactttacgcgcaccagtgagatttgctatgaaggagggctagcccgttttcgtttccgagtcaaatgcagcaagggcacctatatccggaccttgtctgtggaccttggtcaaaaactgggctacgcagcccacatgtctcatctgacacgaaccagtgctgccggtttgttactggatgatgccctgaccttggaagaagtggcagaaaaagtagcgcaaggagatttgagcttccttcatccacttgaaattggaaccggggatcttgaaaaagtagagctgacagtcgaagaggttggcgaagtccaagtgggacgctttattcctgttgagagtgaagccagagagttagctgctttttaccaagggaaattggtagccattttagaaaaaagagatgaactttacaaacctcgaaaagtttttctaacagaaagtgtgttacaataaattcatgaatattcgtacgataactactgctaaccagatccatttggagaatgagacagttttggttctgggctactttgatggcctgcatctggggcatcaagaactctttaaaaaggcgcgtcagatagcaggtgaaaaaggcttgaaggtcgctttgttaacctttcctgaatctcctaagttagcctttgttcgctaccaaccagaattactgcttcatttgcagagccctgaggatcggttccaaaaattaaacgaattaggagtggatgagctctttctcattgattttacgaccgattttgcttctaaaacagccaaagaatttgtcgaccaatttgtcaaatccttgagagctcgggtcttaattgctggatttgattatagttttggctctgataagaaaactgcctctgacttagctgcttattttgatggtcaagtgcaagtcatttctcctgtattggatcagggggaaaagatcagttcgacccgcattcgtcaagctgtcctagaaggacgggtcaaagaagctgcccgtttacttggtcacccattatctagtcggggaatcgtcgtgcatggggatgcgcgtggccgaaccattggctatcctactgccaatttagcgccgattgatcggacctatctaccatcagatggggtttatgtagttgatgttgattttgaagggcagatctatcgaggcatggcttctgtcggaaaaaatgtcacctttgatggaaaagagcttcgtttcgaagtcaatctctttgatttttctggagatatttatggccatactttgaccattcattggttggataagatacgagaaatggtcaaattcgatgggatcgatcaactagtggctcaattgaaagaagatgaagcaatttcacgaaactggatcaaggattaggagcttacctaatccttttttctagctttttcttggaaaaatgaaaggggtttctttttttcagctgaaatttagaaaaatcgtcgagaaatcaaaaaagcgcttttcaagcacctaatttttttgtataatagagtcagatagttatatataaaaaaaagaagtgaaccacatgattacattatttttatcgccgagttgtacatcatgtcgaaaagctcgggcttggttaaaaaagcacgatgttccatttaaagaacacaatattatgacaagtcctttgagcaaacaggagttgacaagtatattggccttgaccgaaaacggaacagacgacattatttcaactcgttcaaaaattttccaaaaattggatgttgatgttgaagatttatccatctcagccttgatccgtctgattgaggaaaatccaagtctcttacggagaccaattattttagataacaaacgcatgcagatcggatttaacgaagatgaaattcgggctttcttaccacggagttatcgcaaacaagagttacgctctgccactctgagagcagaaataaattaagaagtatgtcgaatgcaaaaaaattatagttacccactggacttatcgtggagcactgaagagcttgcttcagtgctttcttttttcaataaagttgaagaagcctatgaaagcaaggtagaggccaaagaatacatggaagcctaccgtgcttttaagaaggtcgtacctagtatcggagaagaaaagcgtctcggacgggagttcgaagaagtgagtggttattctctctatcgtgcgacccaggctgcaaagcaaaaagaggaaggatggttttctcttgaagaataagttagagtttgccaaacaaatcgttttagaggctggagactacttgcgtcttcatctccatgatgacttgatgatctcaaaaaagactgggccgactgatttagtcacccagatggaccaacaggttcaaaaggatttggttgaaaaaatcacacatcgctacccagaagatcggatttttgcggaggaagatggccttcgttcaccgatttcagaaggatccgtttgggtgattgatccaattgatgggaccaataattttgtgacccaaaaggaagattttgcggtgatggtggcctattttgaagacggaattggtcagtttggcctgatctacgatgttatgcgggatcaccttttttacgggggtggagaattccctgtttatcgcaatgaggttgaactgaccccctttgtggaccaacctctggaaaactttttgattgcttcaaatgtcggcatgcttgagaaaaatgattggggcatggcagatcttggtatggattctcttggcattcgagtctacggaagtgccggtattagtttttcaaaaattctctcaggtgggattctagcttattttagctacatctggccctgggattatgccgcagctgcgatcatgggagaacggttaggttataccgttttaaatctaaatggagataaacccaattaccagacagtggaacccattatgatggttccaaaagtgaagttaacagaaattcaaacctatcttaagaaagggagaagttaaatgaattttcccaatggttttaaagaaaaataccagcatcttctaggtgaggatgctgctgctttttttgcgacatttgagcaagaagcagtagcggcctttcgcactaatcccttgaaagaagcgcaaaaagcatttgatgatccgattcctaataccccttggggacattatggaaaggtctcaggaaaatccattgagcacgcaacgggcttggtctattcgcaagagccagcagctcagatagtggcccaagtcgctcagccgaagccagggatgaaggtcttagacttggccgcagctcctggcggaaagacgacccaactcttgtcttatttggacaatcagggactcttggtctccaatgaaatccacaagggccgttcgaaaattcttgtagagaatgtagaacgatttggtgcgcgaaatgtgctagtaaccaatgagtctgccgatcgtctggccaaagttttctcaggcttttttgatctgattgtactagacgccccttgttcgggtgaggggatgttccgtaagcaaccagatgccatggactattggtctgtcgattatcctcgagagtgcagcctccttcaaagagagattcttgaggatgccctcaagatgttggttccaggtggttccttggtttattcaacctgtacctgggctccagaggaaaatgaagagatcgtatcctggctcttggaaacctttgatctggaattggaaacgatcgagaagatcaatggtatggcagatggcatcgactatccagaaacggcgcgtatgtatccacatctctttaaaggggagggccaatttgttgctaagttccgttatctaggagagaatcgacctgccaaaatcccttccaaaaaggaccaattatctgcagaacaaaagaaatggtggcaggagtttgctaagaaacatttgaagattactctggaaggtgtcctcgaaacctttggggacgaactctacttggttccacttggtttaccagatttgcgaaaagtaaaaatcgctcgaaatggtttgcacctagggaccttcaagaaaaatcgatttgaacctagttttgcccttggtcttgctctaaaaccgagtgaagtcaaagagaccgtttcgatcacacctgaagactttgttcattatgtggcgggagagacggttcaattgagggaaaggcatccaaatggatggtaccaggtccttgtcgaaggcaatggtttgggctttgccaaagtgaccggacagaccctgaaaaatttctatccaaaggggcttcgttttaggtaaaatgctgggcaaagaacccgttctatgatatagtggaagtacaggtttttttgaaaaaaacttgtcaaaatcataagtgaaatagtgaaatatcaaggagacatgatttgaaaaagtctaaaaagctgatcctaggactagcgacgatcgcattagcaggaagtttatctgcttgtgcttcttggatcaatcgcggagaatccatcactgctgtcggatcgactgccttacaacccttggttgaaggagtagtagatcgctacattgaagaacatcctggtaagattgtaaatgtacaaggaggaggttctggtacaggactttcacaagttcaatctggcgctgtggacatcggaaatagtgacctgtttgcggaggaaaaatctggaattgatgcctctagtctggtcgaccatcaggtagccgtagcagggacagccattatttccaataaaaatatctcaatcgacaatttgacaacagagcaattgcgaaagatctttacgggtgaatataccaactggaagcaattgggaggtccagatcttgaaatcacgattgtgaaccgggcggttggttcgggtagccgtgctgtctttgatgccattatcatggatggcaaacaacccaagcaggcccaagagcaagactctaatggaatggtgaaaaatatcgtttctcaaacgccaggagccatctcttatctagcctttacctacttggatagcagtgtcaaaaccatgaagcttaacggttatgaaccaaccaaagccaatgttgtcaacaataactggccaatctggtcttatgaacacatgtataccaaaggaaaacccaataagttgtctaaaaaattcattgactacatgatgaccgatgagatccagcaaaaggttgttggtaagatgggctatatcccaatcaatgatatgaaagtcacccgtgatttaaaagggaatgtgacaaaaaaataaaagaattaggtaaaaaatgaacgaagtagcaaaaaaaatgctgacgaaatcaaaaaactcccgcctagaaaaatttgggaaaaccattacctttctatgcatgagtttgattgttgtcgtcgttgccatgattttgattttcgtggcccaaaaaggtttatcgactttctttgtcaataaagtcaatatctttagttttctatttggaagctcttggaatcctgctgcaaaggaattcggagcgctgcccatgattctaggttcctttattgtaaccttgctttctgccctcttggcaacgccgtttgccattggtgcagcagttttcatgacagaagtctctcctaaaggagctcgtttcttgcaaccagccattgagctcctagtggggattccttcagttgtttatggattcattggccttcaagtggtcgtcccatttacgcgtagtctctttggagggactggttttgggattctctcaggggtctttgtcctctttgttatgatcttgccaaccgtcacctttatgacgaccgatagcctccgagctgtgccccgtcattaccgggaagctagtatggccatgggtgcgacacgctggcaaacgatttggtatgtcacgctcaaggcagcccgctcaggaatttttacagcggttgtctttggaatggcgcgtgccttcggggaagccttggcgatccagatggtggtcggaaactcggcagtggtgcccacctcgctcacaacaccagcttccaccctcacctctattttgaccatgggaatcggaaataccgtcatgggtacggtcaataacaatgttctttggtcactcgccttggtattgctcctcatgagtcttgcctttaacagtgtgattaaactgattacgaaagaaagaggtaagaagaactatgcacgctaaacgaatggataaaattgcgacaggagtgctgtatgctatttcagggatcatcgttgcgattcttgcctcattgatcctttatatcttggtccgtggcttgccccatgtatcttggcacttcttgactgggaaatcttcttcttaccaagcaggaggagggatcggaattcaattgtataattccttcttcctcttggtcattaccttggtgatttctttcccactttctcttggagctgggattttcctctctgagtacgctaaaaaaggtcgcttgaccaatttggttcgtacctgtattgagatcttgtcttctttgccatctgtcgttgtaggtctctttggttacctggtctttgttgtccagttcaaatacggattttcgatcatttcaggggccttggccttgaccgtctttaacctgccacagatgacccgcaatatcgaagatagcttgcagcacgtccaccatacgcagcgcgaagcaggtctagcactgggcttgtctcgctgggaaactgttatccatgtcgtggtaccagaagctcttccaagtattatcactggggtcgtcttagcctcaggacggatctttggggaagctgctgccttgatctatactgcaggtcaatcggctccagcccttgattggtcaaactggaatatctttagtgtgaccagtccgatttcgatcttccgtcaggctgaaaccttggctgtccatatctggaaggtcaatagtgaaggaaccattccagactcgatcgaagtctcagccggttcagccgccgttcttttgatctttatcttgatctttaactttggagcacgcaaactcggaagttacctccataaaaaactaacatctgcttaaaggagaagaaatgtcaaaatacaattgggatgagagacacatcattacttttcctgaagaaaaggtggtcctatcgaccaaagatttgcatgtctattatggaacgaacgagtccatcaaaggcgttgacatgcagtttgaaaagaataagattacagccttgatcggtccttcaggatcagggaaatcaacctacctacgtagtttgaaccggatgaatgataccatcgatattgcgcgtgttacgggtgaaatttggtatgaaggaatcgatgtcaatcgtccggatatcaatgtttatgaaatgcgtaagcacattgggatggttttccaacggccgaatccttttgccaaatcgatttataaaaacatcaccttcccgcatgaacgtgcgggggtgaaagacaagaagatcttggacgaattggtcgaaacttctttgaaacaggcagctctatgggatcaggttaaggatgatcttcataaatcagccctgacactttcaggtggccaacagcaacgactttgtatcgcacgggccatctctgtgaagccagatatcttactcatggatgagccagcttcagcgcttgatccgatcgcgacagcgcaattagaagaaaccatgcttgagctgaagaaggattataccattgtcatcgtgacccacagcatgcaacaagcagcccgtgctagcgattataccggtttcttctaccttggaaacctcattgagtacgataagacttcgaatattttccaaaatgcgaaattgcaatcgaccaacgattatgtatcgggtcactttggataaagtaaaatgacaacaaaaaggaaaatagaatgacagaaccaattttgcaagtcaaggacttgtcggtttattacaataaaaagaaggctctaaatagcgtctccttggactttgctccaaaggagattacagccttgattggtccttcaggatcagggaaatctactcttttaaaagccattaaccgcatgggagacctcaaccatgaggtcaccaccacagggactatcctctacaacggtcacaatatctacggaccacggaccgatacggtcgaattgcgtaaggaaatcggaatggtcttccaacagcccaatcctttcccaatgtccatttatgataatgtgacctatggcttgatgattaatggtgtcaaggacaaggctgtcttggatgaagcagttgaaacctctttgaaacgcgcgtccatctgggatgaagtcaaggatcgcctgcatgattcagcgatcggactttccggtggtcagcagcagcgggtctgtgtggcgcgggtccttgcgaccagtccaaagattattcttttggatgagccaacttcagcgctggacccaatttcagctgggaagattgaagaaaccttgtatggactaaaagaccgctacaccatgctcttggtgacacgctccatgcaacaagcaagtcggatttccgataaaacagcctttttcttgaatggggatttgattgagtacaatgataccaatgaaatgttcttgaacccagctaagaaagaaacagaagactatgtctctggtaaatttggataggaagaaaataaaatgttacgagttcaatttgatgaagatttagagaagttgcataaccagttttacgcaatgggaaatgaagtgttgagtcagatcaaccgtacggttcgtgctttcgtgacccatgaccgtgaattggcccgtcaggtcatcgaagatgatgcggagatcaacgaatacgaagtgaagctagagcgtaagtcttttgagattatcgcccttcaacagccggtttcacaagaccttcgtgtcgtgatgaccgtcttaaaagcagtttctgacttggagcggatgggggaccacgcagtatcgattgccaaggcaacgattcgcatgaaaggggaagttcgtatccaatctgttgaggaagaaatcagcaagatgggccgtgaagtcaaagattttgtcgaagcgacactagatgtttacctcaaaggcgatgtggatttggcctatgaagttgcttcacgagacgaagtcatcaaccattattttgatagtatccaagaattagcaacagaagaaattcggaaaaatccagagtccatcgtgacgggtcgtgattatttccaagtgatcaacttcttggaacgcatcggagattatgcaaaaaatatctgtgaatgggtagtttactttgaaacaggtaaaattatcgaaatgtaagatcatggagtcttttcgatctcagacaggcattgtcatgcttgtcttttcttttatcccaactttgtgataaaatagttttattagggcttttgattggaaaagcgtaaaacatttaaaggaggaaattatgcaagcagttgcacattttgtagaaacattcgttccagaacattacgaggtgtttttggatttaagtcgtaaaactaaggcctttagcggtcgtgtagtgatcacaggtcaagccaaggcggacaagatctcgcttcaccaaaaggatttgaccatcgaaacagtagaagtagcaggtcaagctcgtccatttacggttgatgatgccaatgaagcagtttatgttgaattggaaggcacaggtcaagtgacagttaccctgacctattctggtaagatcacagacaatatgactgggatttacccatcttactacagcattgatggcgtgaagaaggaagtcctttctactcagtttgagagccattttgcgcgtgaagcctttccaagtgtggacgagcctgaagccaaagcaacgtttgatctttctttgaaatttgaccaagaagaaggcgaaattgccctctcaaatatgcctgaaattgatgtggaaaaccgcaaagaaacaggaatttggaaatttgctacgactccacggatgtcttcttacctccttgcctttgctgccggagatcttcaagggatcacggccaaaacaaaaaatggcactctcgtaggcatctattcaaccaaggcccatccgttgaaaaacttagaattttctcttgatgtagctgtacgtgtcatcgaattttatgaagactattatggcgtgaagtatccaattcctcaatctcttcatatcgcccttccagacttctcttcaggtgcgatggaaaactggggcttggtaacctaccgtgaagtctaccttcttgttgatgagaattcgactgcccaaagccgtcaaacagtagccttagtggtggctcacgagttggctcaccaatggttcggaaacctggtgaccatgaaatggtgggatgacctctggttgaatgaaagcttcgccaatatgatggaatatgtcagcttggatgctatcgaaccaagctggaatatctttgaagacttccaaacaaccggtgtgcctgctgccttgaaacgcgatgctacagatggcgttcaatccgtccatgtggaagtcaaacaccctgacgagatcaacaccctctttgacccagcgatcgtttacgccaagggtagccgtctcatgcacatgcttcgccgttggttaggcgatgacgccttccgtaaagggttgaagatctactttgaaaaacaccaatacagcaataccatcggtcgtgacctttgggatgctcttgggcaagcttcaggtcgcgatgtagcagcctttatggattcttggttggagcaaccaggataccctgttgtctcagcttctgtggaaaacgataccttgatcatccgtcaagagcagttcttcatcggagaaagagaagaaaaaggtcgcaagtgggttgttcctttaaatagcaactggacaggtattccagatactttggaaactgaagtcttagaaattccaaactacagtgccttgaaagcagctaacagcggagctcttcgcttcaatacagaaaatacagctcactatatcagtgactaccgtggggaattgttggaagacatccttgctgagcttgctagcttggatagcacttcgaaactacaagtggttcaagaacgccgcctcttagcggaaagtggtcaaatttcttatgcaagcctcttgccagtaattgaacacttgacagaagaaagttcctacttggttgtttcagctgtttcgagcgtcttagctggaatcagtctctttgtggatgaaggaactgaaacagaagtggccttccatgagttgttgaaacgcttgaaccgttacaactttgaacgcttgggtctagaagcgaagcctggtgaaacagaagaagatgaaaaagttcgtcagctaatgattgctattatgatcaaggccaatgatgaagctgcaaaagctcaagcgagcgctatttttgaagcgcatgcagatgatttggaaaaacttccagctgccatccgcttgcaaatcttggtcaaccaaatcaagcaccaggaaaccaaggagcttagccaacaatacctggatacttatgttaagacagtagatgggaactttaaacgccagttggcggctgcactttcttataccaaggatgaggaaactttggaagctctattgaaggagtggaagaacaaggatgtggtgaaacctcaggacttggctatgagctggtattacaacttcttgcatgatgactttacccaaggtagaacctggacttgggcgcgtgaaaactgggattggatcaagaaagcacttggtggtgatatgagctttgataagtttgtcatctacccagctaactgtttcaagacccatgaacggttgaatgaatacaaggccttctttgagcctcaattggatgatatggcgatcagccgaaacatcagcatgggaatcaaggaaatcgcagcgcgtgtggatttaatccaacgggaaaaagcagcagtagaagctgctatccttgcgacaaaatagatttaaaaaagatgagagtgggacagaaatcggtaattcgttagaattcgatttcgtcgtcccacctccgcacagttgggtagggctgtaaaagctgatgaaatcagcgtagtagagcccactcaaccactgcgtcttgctcgacaatccaaaaacaataaagaggctaggacttttgtcccagcctcatcttttgtttttcaatgaatcatttgaattggatatcgaaggatcattagtttattggacttggtaagaggatctccgttcgataatggccgttttctttgaatcgtttgatagttccttggtattcttgtactagggcatcaacgtttcgcaagccccaaccatctctttgacgttttttacgagtctcttgttcctgttcattaaaggtattgttgatcgaaataaatagattttgttgaaaataacgtatattcagagacaatgttctctctgatttatcagtcaatcgaagacaggctgaaatactattatccaaacaatttcctaaaataacagctagcacatctggctgaatagatagttcttgtgggataaagcagttaatttctaatgcaatttcatcttccacatcgtgcagtttttgattcagtaaataattaaccgttggatttttggagtaaaaggtttgttttcctgaaatactatcggttaacgattgaagatactctctagcttcatcaggattttcttctagaagtgccaagagggttaaatgtttattttttaagtcatgccgaagactttgcaatcgttggtattcctcttgagactgttgtgtttctcttaattggaactgaagttgttctttatctaatttattttgataataagcgtgctgttgttgagaaagatgtaaggtaaaatacagcgaggaaaacgacaatacaataagagacaagagtgaaatgacagaaagataatctggtccaaatacttgtccttgaatagcagatacagtaaaggcaaaaataatcgataaaatcggcacgataaattgataaagccaatttcttctagatgttgccatggttaacttttgatgtgttcgaaatagctgtcgaagaacaagagtgatcacagttgaaaaaagaaaactgatagcaaggtaaccactaatcagttctaaatttttcgatacttttgacagcggaagaaatagttggatagcttgattgaggacagctccggctaataatgtcaggcttgtttgtaagaatatccaaaaagaagaatcacgaaaggagtagccaaaatagagtcctacaagagaggattctacaatactcagaaagagattgctgactaaaaaaacgcgactttctaaaaatagaaacactagagccacatgaaaaagcaagaaacaacaaaggactaaaagtatttcttttgaatgtttacttttggatattggcctataaaataaaacacttgccagaaataagtcaaacaagatgctaatgatccgcattcctattagcattagaaattcctttcactgagatagttatagtatttttctttaaaagaagaatggaacttacgactaattggaagtgaatgttcctcggttccatgtagcaaaatagttactgttttcgcatcaaaatctttgatatatttaggatttacaatataagaagcatgaatttgaataaaataatcaggtagtttatctaaaatttcttgagttttcagtaaggacttataggtatctgctagtgtgtaaataaaaacggaacgcttatctttctcaaaataggtaatgtcacttaaaggaatagagtaactttgttttccaaatgagaagttaaagatcgtttgtcctaaatctaaataacgtaaaattctgtctactaccttatttagcctttggggttcaatgggttttactaagtaatcaaaagtctgtacttcaaatacttgttccatgtaatcacgatagctggtcacaaaaataatggggataaaaggattgaactgacgaatttcacgtgcaaggtcaattccagtaatttgtggcatatcaatatccaaaaaaacacaatgcgtatcccttgttaactgttctagcattttttgtggatttgtatatagttttgtttctacaggaaccttgtcgtaagaaagtaaatactgttctaactgactagcatctctagttgagtcatcacaaataacgacgtttaacataagtcccccttatcaaattgagttggctaattatgacactaaaatggtaaatcatgacgtaaaccatggaaagtcatatgtttattatacaataatcttatcaaaaatgaaggaagctgggaaaatcttctcagtcttgagtgatgagatgaagacatttgcgacactgactattagagatttgacaaaatcatttgataagcaacattttgctaataaccatatttccttagaaatagaagctgctaaaattacagcctttttaggacataatggtgctggtaagtccaccctcttaaatcaaatgattggttttaccaaacccgataaaggagatgtatgctatggagacatttcttttgtacagaatcgtaaacaagctcgctcaatgatgagctatatgtcgcaacagtatgcaccacttgagaaattgacggtggaacaaaacatagaaatgcttggaagaatgagaggattaaacagcttagatttacaaaaggaaatggatcagctcctaatcgacttggaaattaaggagtaccgggcaaaacaaggaaaggatctctcaggcggtttaaagcgtctaacttcttttgcaatggctttgatcggatctccgaccattattcttcttgatgagcccacgaacgatgttgatccaatacgtcgtgaaaaacagtggcaattattgcagaagctagcccataaaggtcataccattattattgtgacacataacttgttggaagttgaaaaatatgcagacaactatgccttatttaaccatgggaagttaatcaaatcaggcccagttcagcaaataacctatcaaaaacagtaccaaatctcttttgagcttaggaatgaagatagcttagctctattccaagattatactattatcaatggttcgatttgccagattgaagtagaagaggaggagttaacaagactgctaccaaaactaacacaggaattggatagaaagaatatttttaatctgtcacttgctcagaaaaacgtatccatttcagatctttatagagaggagttgacaaactgatatgactcaatttttttacttacttcgttggaactatcttcgtcaaaaagatctatttctactctttacactagctcaggttctgttatccatttcacttctttttggttatccattagtgataggtgagattgatacgacagctgcctactatctctcttctggttcagttctgataggaattatttctattggttgtactatctcatcccctgttatagcaaatgcgaagtcagaaggacatgtagactacgtacgagcccttccaatacctcgaattctgatttccttagcagatctttggatgtggatgattgctattttacctggagtattcatttctgttatactgggctattttcgtttttctgtccgcctaaatgtatctgttctggctgttttcatcctatttctgatctgtcttacgatgatcagtcttggatttgccattgcttatactttttctcccaatattgtcacgttgatgtctcagttgattctcatgattggtttgatgttttcaccaatcatgtaccctgcaagtcgtcttccagattggataaaccatctctaccatgttcttccatttgtcccttctgtcaacctcctacgagcttgtgtctatagtcatggtcccgtctcattttttgacttcaccattctgatcatctggattttgttaacacagttactgatcttgagagttctttataaggaaaaataaaggaaggaggatctatgtttttcatcattaaaacagtgttctctttaaaaggagttcaattgaaaagatttatacatgtatccctataacaaaaatcaacatctgcgttcagatgttgatatttttaatatatccgctaagccctttgtatcttatttgaaataccagtggtgtttaaggctggcaaaaatcgccttgctggtgatcgtgatgatgaccagtttgatgaggtcggcaaggataaagggagcaacgaccaaagcaaatgctttttggagatcagtatgcgtaatcagcataaagccgatagctccggatacaaagaggagagcactactgaggagattggcaaaaaagatagtgacaaggctggatttggcattggtaaataaagacgtgatccatgctcggaatgggaagaagaggaggaaaccagcagtaggaccaaggaaatgcgaagcgccaccagcaccgccggcaaatactggaaaacctaagaagcctagaagtaggtagaggcagacagtgacaaaggcatggctgggtttatagatggtcccgatgatcccgatcatgagcgtctgcagggtcaaaggaattggaccaaatggaatggtgaattgagataggacggagatcatggccactccaatggagatgagaactaagggaaatattttcttcatatcagttaacctcttgtttgttttatggtaactattctacaataaggggttcatcctgtcaatagcccacgcttattttaggattttttaagtaaaaatttaggcaggcttaagactcttgaagtataatcgccatacttaaaggatcgagctccctttaaaatttaaaagacaagtacttgtaaaaaaagataaaaggtaaaaagatgaatcaaaaagaaacaaaacaagtagtcgaaacgcaagaatccaaagaaaaaatagttgtcctcaaacgaagccctaagtggtggattggaatggcagcaattggtggattgttggtcggtgctggaagtggctttggtgtcggtgtcatcgcctctcaatcttccaataaccaacaattttctcaaccagtccaaacgggtcaaaaccaaggatctaatcagcaacaaaatagtcaaaatggccatgcttcacaaggaaaccagcaaaatggtggtccacaggatggcggacctcaaggcggtggtccacaaggtggtggccaaggtggtccgcaaggaggtggtcctggtcagatgccgcaagaaggcaatggtggcccacaagggaatggtccagaaaatggcatgaaccaatctagcggacaagaagggaaccagggttcctctaaaaagtccaataagaagaattcaaaaaataaaaacaagacgagtgatagtcaaagtaacaaagaaaacacgacaaattcatagaattagccttcctcaggcaggctgagtttgatcataaaaccaggttctaaactataggaaatgaaggcaagtcgtgttataatggttaagaatagattagaaagactcactcacgaaagagaagaggatacgacgatgattaaaattctattggtcgaagatgaccttggtttgtcaaattcagtatttgattttttagatgattttgcggacgtcatgcaggtctttgacggagaagaaggtctttacgaagcagaaagcgggatctatgatttgattttgctggacctcatgcttcctgaaaaagacggcttccatgtcttgaaagaattgcgtgaaaaaggcgtgacaacccctgttttgatcatgacagccaaagaaagtctggatgacaaggggcacggctttgagctgggggcagacgattacctcaccaagcctttctacctagaagaactcaagatgcggattcaagctctcttgaagcgctcaggaaaggtcaatgaaaacaccctcaattatggcaatttgaaagttaatttatctaccaattcgacttatgtggatgggaaagaagtggaacttcttgggaaggaatttgatctcttggtctacttccttcaaaaccaaaatgtcatccttccaaagacacagatcttcgatcgcctttggggatttgacagtgatacgactatctctgttgttgaggtctatgtttcaaaaatccgtaagaaattaaaaggtaccgatttcgttgagagcttgcaaacattgcgcagtgtggggtatatcttaaaagatgctaaccagaattaagaaaactgtcggagaagatgatttttcctacttcatccgatattttgggctctttaccttgatattttcagccatgaccttgattatcattcaggttatgcgctcgagtctctatacaactgtcgatgagaacctcaagactttaagtaaggatccttattcgctagcggctattgcttatcgggaccagcgacaatcgaaagataaggataatgatgaagatcctgaggtgatgatcccagatcatgataaatcagaacccaaaggagatgtcacatccaataccactgttgtattgctcaacagaaattatgaaaatctgacgacaggcaacggatttttaaactttaaatctgtcacttttggccggaagttgctcaacaaagtttcccagctccaaattacaaatagctacgggaaaaaagaaagttaccgggcttatatgactgatttgggattgactgatgatgggggaagtgacgttaagtatgcggttatcatgactaatattagtcagttggagcagacgagtgaagagcacgaaagtcaaatcgctcttgtcatgatctgcttctggggaatttctttgtttgctagtcttttcctagcacgtctcagcgttaaaccccttcttgagagtatgcaaaagcaaaaggctttcgtagaaaatgcctcccatgaattgcggacgcctttagcagtcctccaaaatcgcctcgaaacgctttttagaaaacctgaggcaaccatcatggagtcaagtgagagtattgcatccagcttggatgaagttcgaaatatgaagctcttgaccaccaaccttcttaatattgcccggagggatgatggcttgaagccagagatagaagaaattgagccaagcttttttgatcagaccttctcgaattttgagatcattgcggaagaaaatggcaaattcttccagggggacaatcaggtggacaaggtcatttgttctgataaaacgctcctcaagcagttgatgaccattctctatgacaatgccttgaagtacaccgacgaagatggtgagattcagtttgaagtccagttgaaggacaaaaatcttcttttgagagtactggataatggacctggtgttcgagacgaggacaagaaacggatctttgatcgtttttaccgggtggataaagccagaacccgtcaaaaaggtggatttggtttggggctatctttagccaaacaaattgtagaggcttttaagggaaccattcaagttaaagataataaaccaaaaggttccatctttgaagtaaaattatccatcaagacggaaagtcgtaaaaaaatcgttcataatttaaaaaaatagaaaagaggaacacttatgagttcaaaaatgttgcacacttgccttcgtgtggaaaacttagaaaaatcaatcgctttttaccaagatgcttttggttttgaagaaaaacgtcggaaagattttccagactacaagttcacgattgtctatttgtccttgcctggagatgactatgagttggaattgacttataattatgatcatggtccatatgtgattggagacggctacgcacacgttgccttgagtactcctgatctagaagctttaaatgccgaacacaaggctaaaggctatgaagtgacggaaccaaaaggtcttccaggaacgcaaccgaattactatttcgttgtagatccagatggatataaagtagaagtcattcgcgaaaaataagagtgattaaaattaggggccactgccggtgacgacagtcgccctcttttttatgaaaccatttacaaaaaaggaatgttttttcgatagaaatttgctataataaagttatgagattcaaacacacgaaaactatattattaatcattacaaatctccttttactgagtcttttgtatatcggctatcaaaagattcaaagggttcgtgaacaaaaagcctatcaggatcagtttgctaaggtcacccaactagagaaaagctctgaaaaagggaaagatgttcaagttcaggaagggattattgggacatcttatgtgaccacttattatcctactaaggatggacaagctgttgagattattaaagagaagattcaagaagatcttcagcgtctaggatccgatgagaaaaccaaagagcctaagcatttgaccttctaccatagtgaagaagcagaagcgccttttgttggctatcatcctatccaaatcaaacgggttgaataccagtataaaaaaggaaaattcatcaaagatgagaccgtgaaactacctctcttctacgtggatgatgagaaccaccctctgaccctcagtcaggtttttgcggatccagatggagccaaacagatctttttggaggaattgcgagggaatctagactttcgtcagttggatgaggaaagcattgatcaaatggtcgcccacttttcagggttggatttgagccaatgggaattccaatatgaaaaagggaattttaccattccatttccaagcaaggttaagggagatgataccttcactgttcccttgtctaaattctatgatgtgattgatacagagcgcttgcttcctgacgatctagcttcttaccaatcctatattgaagaacgccatcgtaagatgattgccctgacctttgatgatggaccagatccgacgacgacccctcaggcgctggccatcttaaagaaatacaatgccaaagctaccttctttatgatcggaaaaaatgtcagtgcgaatcccgatattgctaagcaagtccgcaaagaaggtcatcaaatcgggaaccatacttgggatcatcctcagttgccaaaattgagcttggataatgctaaaaaagagatcttggatacccaagaagctattcaaaaagcgacaggtgtccaaaccaagattacccgtcctccatatggagccatcaataacgccatccaatacggtgtagaccaatccttcatcatgtgggatgtggatagcctagattggaagacacataatacgacggctattctcaatgaagtgaaaaaagaagtcaaaccgggttcgattatcctcatgcatgatatccatcaaaccacgattgacgctctaccgaccgtccttgactacctcaaatcacaaggctatacctttgtaacggtggatgagttgttggattatcaacttgaaagtcatcgcatttattacaatggaaattaacataaaaatcctctgcagttcattcactagcagaggattttcttattcatttaaaaagagttctgaattttttaaaaccagttcacgtacagaagcgtatttttttaaggatttgagttcttctgggtgggtgataaaggtgatcacatagccatcacgccccattcgtcctgttcgaccagcacggtgggtataggtctctacatcacgggggatatcgtagttaatcacacactcaagatgttcaatatcgattccacgagcgaccaaatcggtggccagcaagagggtcagctgatggtctttgaagcgttccagaataaccttgcggtatttgacattgacatcactggcgagcgatacggcctcaacgccccggtattgtagtttttcttcagcactacccagatcagataggctgttgaaaaaagccagaccacgaaaatcttcgacgtaggcgagtttgcggagcaattcgaccttgtcccgcttatccacttgcatataaaaatgttggatattgtccaaagaaactccatcgaccgtaacgcgaagagtattttcctctagttggtctggatcgaccttggctgtggcgctcatgtagatatattggtggtcacggggagcatagtggctgatcttgtcgacgaagtggtactgagaatcacttagtaattggtcgaattcatctaaaatgatggtttctacattcatcattttgatctttttcagcttgatcagttcaaagatccgaccaggagtcccaaccaagatttcgggtccttttttgaggcgttcgatttgccgtttttgactagatcctgaaaggaagagttgtgtctggagcccgagaggctctgcccattgtttggtgacatcaaaaatttgtcctgctaactctgtgttaggagccaaaatcaagagttgttgggccttcttcggtttgagtttgagcaagctcggaaagaggtaggcgagtgtcttaccagtaccggtaggactgatcccgaggacattttctccctcataaattggggagaagatctgttcctgaatttcagtgaatgtatcaaatccgagtgtttctaactggtctttccagctttgtggaaattgttctttcattctttttcatccttaaattgtattccagcgctttgacgcatctggtagagggtttcatggacctgctcagctgtttgtaaccactcaagataagcagacggcttttgatgagcgatggcaaaggcttctgcctctttttgcatttggtgtgggcagggctggatcggaaggtcgatgatttccccagaatggctgatgaagcgagcctggttgatggctgctacagcattgagagttagcgttccagtcttggtgtagatttcagcaggtaaatggctggtgatatttttccctgcctgaatggcaacctgaaaatctggataaatcaagacaccttggccatagagatcaaccgaattgggtaattgctgagcggtgtagtggcttgagattggagttccaaagaagccaatggccaggtagaggcagtagactcccagatccatcaaagctccacctgcatagacatctgagaaaatattgggcatctcacctgcaagaagggccggcaatttggaagaatatttggcaaaggtgaagttagcgcctagtatttcctggttagagaggaagtctttaactacttgaaaggctgcttcttggtaatttctggcagcttcaaagagatagacctggtgctccttagcgagcttgaccagttccttccattcagaaggcttggtcacagcgggtttttcaatgatgacatgcttcttggccagaatagcaagcttggcctgagcgaaatgaagagaattggggctagcaatgtagaccacatccagctcactgtctaagaagtcgatgacatccgtgtagcaagagatcgccccataaggctcacaaaactcttgagccgtcttcatctttctcgaatacacagcctgcaagtgatagtggcccgtctgatgagcaactgtaataaattcatgtgaaatccaactcgtaccaataattccaagctttaacataaggtgtccttccgtaatcgattcactctattataccatgaaaagggggagggacggggtgaaaaatactagggtttatgagagttttttgttacaatagaaagtgaataagtcaaggagtaagagatgaccatatcagttgtagtcccgtgttttaacgaagaagaatcaattccattgttttatcgagaaatggaacgtgttcggatgaagatgggagaaaagtttgaatatatttttataaatgatggctcctcagatagtacgctatccgttcttcgaaagctacatgttacagattcaaatgtgcactacctttctttttctcgaaatttcggaaaagaggcagcactatatgctggacttgagcgtgctagtggtgaatacgtgaccgtcatggatgtggatctgcaggatcctccggaattattgattgaaatgaagcagaggttggaggaacagccagatctagactgtgttggaacccgacgcgtaacccgggatggggaacctccgattcgctctttctttgcgcggacgttttataaattgatcaatcatattagccaagtggaaatggttgatggagcgcgtgattttcgtttgatgcgtcgtcctatggtcaatgctattatggagttatcggagtacaatcgtttttcaaaagggatttttgcatgggtaggatttgagacagaatacctcgaatataaaaatgtagagcgcgtggcaggagagacgtcttggaatttttggtccctctttaaatattccattgaagggattgtcaatttctcggatgccccgctaaatattgcctttattggtggacttttatcttggatcttggcctttatcatggtgattctgatcgtaatccgtaccttagtctttggggatcccacttctggatggccatccctcatgacagtaattctttttcttggaggctttcaattactaaccattgggattttagggaaatatattggtaagatcttcatggaaaccaagaaacgtccaatctatgttatcaaagagaaaagtgagtaaaaagcagaaaacttctgctttttttgctataatgatagggaaaaagcatttgaaaggaatttaacatgattttaattacaggagcgaatggtcaacttggaacagagcttcgccatttgttagacgaacgaaatgaagaatatgtagctgttgatgtggctgaaatggatatcactaatgcagagaaagtagatgaggtattcgcagaagtgaaaccaaccctagtctaccactgtgctgcttacacagctgttgatgcggcagaagatgaaggcaaagaattggactatgccatcaatgtgactggtacagaaaatgtagcaaaagcgtctgaaaaacatggtgcaaccttggtttatatctcaaccgactacgtttttgatgggaaaaaaccggtgggacaagaatgggaagtagacgatcaaccagatcctcaaacagagtacggtcgtaccaaacgtatgggggaagaattggttgagaagcatgtgtctaacttctatatcatccgaacagcttgggtctttggaaactacggtaagaactttgtcttcacgatgcaaaaccttgcaaagactcacaaaacacttacagtcgttaatgaccaacatggtcgtccaacctggacccgtactcttgcagagtttatgacttatttggctgaaaatcgtaaagattatggttattaccacttgtctaacgatgcgaaagaagatacaacttggtatgactttgcagttgagatcctcaaagatacggatgttgaagtgaagccagtggattctagccaattcccagctaaggcgaaacgcccactgaactcaacaatgagtttggcaaaagcgaaagcaacaggattcgttattccaagctggaaggatgccttgaaagagttttataaacaagaagtgaaataagaattttacctttataaaaagaccggtaaggtctttttatattgaagtaaaattattttcactttttattgaatctaatctatagtataataaaggaaaatagattttgtaggagaagcaaaggtgtcacaagataaaaaatatcgcgaaaaaggtgatattaaagaacaatatttgtatgataaaaatccttcaaatggttctacaaaacaaaattatgtttggaacttatttggaacagtttcttcatcgttaatttcagttgtactattactttttgcttctagatttcttgattcacacaattcagatatttttagtattgcatatgctttgggccaacaattttttgttctaggttacttccagatacgtaatatgcaatctactgatattcaggaaaaatactcatttatctcatatcataatacacggattgtaacaattatgatgatgatactaacttctgttggatatgtaattttccagggatatgatttatataagtctataataatcttactgttggtattatatcgtgcaatcgatgcttattctgatgtttttcaaggatactttcaacaacaaaaccgttctgatcttgcaggaaaagttcaattttatcgaagttggatttgcataatagtctttgggtttagtttgttactaacgaaatcattaatgatttctagtatcgttatatgtttgattaatttaatacttacagttgtcttagattatagaatttctattaggaacttcaatacaaaattttttccttcaatatcaaaagatttaagcagtatattttctattttgagagaagcttttcctttatttataaatggatttgtaataacctatgtctataatgaagctaaaattgatattgatttgctactgtctaagggattattttctaatggtattcagcgggactttaatgtactgtttatgccagtttttgttttatctctcttattttttgttttgagaccattgacgactcaattatcgatttattggtacgaacggaaatatgagttattttataagcaaatttatattttatttacaactatgactatcttaggtgtaattattataggtctgggttatttaataggtacagagattctaggtcttgtctatggtatatctttaatagaatataaaataccttttgtaatacttttaactggaggtattcttaatgtgttggcgcttgttattgatatagttatgacaatttttagaaagcaatcatatctagtgattgcatatattactacctttattgtggctaaattgattactatgatatttgtaaaaaaagatggaattctaggtgcatcattgtcatttttaatttcgatgactatcttttttattacaagcatgttgatctatattttggtaaataataatgataaaagaaagagaagttaatgaatattttatttacattaaataatgcttttgttcctcaggtagcaacttgtatgtgttcaatttttgagaataataaatcaattgatgaaattaatatctatttgattgcttcgaatatttctgatgaaaataaacagaaattaattgatttcgccaaaaagtatgggcgtagtgtacatataattcatttagatgatgtctcagaatttatagattttgactttgataccaatggttggtcttctattgtactagctaggctattccttgataagttactacctgataatattaatcgaattttatatttggatggtgatactcttgtattaaaagatctttctaaattttataatattgatcttggtgacaacgttttaggcatgtgtcccgaacctactgtagacaaaagaagaagggaatttctatctttaatggaagctccatatcataattcaggagtactattaattgacttaaagcaatggagaaatcgagaaatagggaaaaaagttattgatttttataagcagcacgatgggaaactttttgcaccggatcaagatgcattaaatggtgctcttaaagatgatatagtgacattaccaatttcgtataattatttcaatatatatgatacatacccatacagaatattaaaacgattaagtttacctgcagatttcatctccaaaaatgagtttttagaaattaaaaaatcaccttcaattatccactatttaggagaagaacgtccttggcgaaagggaaacacacatagatttgcaaaacaataccttgaataccaaaattgtacaccttggtcagatactcctatggaaacaggttgggaattatactttatttgttttaggatatttaatataattatgaaaccttttccaatgttgagatataagattattaactcgctgataccagcatttatgaaataccgaaaaaaacagctccaaaaaaataatagatagacgtattagacatagaaagaaaaagaatacatgagagttttaatgataattcctgcctataatgaagaggaaagcattttcgatacggtaacaagtatcttgaattaccgcaagaaagttgattttgatttggactatgttgttatcaatgatggatcaacagataaaacaaaacaaattttggaagagaatcattttaatgctgttcatcttgtgatgaatcttggaatcggcggtgcggttcaaacaggatacaaatatgcactagagcatgactatgatgtagcagttcaatttgatggcgatggccagcatgatattgaatccttgtcagatttgctagaaccaattcgaaaaaatgaagcagacttagtaattggttctcgttttgttggtgatgttaagtcggaatttcaaacgacttttatgagacgttttggtattggcgttatttccaatctgattaaatggacaacaggacaaagagttttagatacgacatcaggctatcgtttagctgataaagctgttatcaaacaatttgctagacgttacccaatcaagtatccagagcctgaaacaattgttcacattttgaaacgtaaatataatgttgtggaaaaacctgctaatatgtttgaacgtactggcggagtgtcctccatcacccccatcaagtctattcgttatatgattgaagtatgttcatccattttaatcgcagcctttatgagggagagtgaataatgtcagtattatctatagttatgttggtagcttcaatctttttcctttatctagtcattagaaatatcaacaaaaataatatcttatttgaacaagcattcatgtggattgtaatcagttttgtcatgattattatttccattttcgatgttattcctggttattttgctggtttacttggatttgaattgacttcgaattttttattgtcgcttgctatatttttcttgttggttattgcttttttacaaactatgactttgtcaaaacaaaaagagcagatgaagcatttagttcaagagttgtctattctaaaaagtcatatagaaacgaaagagggaaatgatgaacaataatcacacttgggtgatttgtgcttatggagaaagcgaatacttagaagcttgtattcaatctttgaagaatcaaactctccaatcacagattatctgttacagttcaacaccactggattcgatcaaggaactttgtcagcgttatgctattccattttacaccaagcaaggtggtgggattggtaaggattggaacaatgccatgtcttttgtagagacgaaatatgctaccattgcccatcaggatgattattatgaaccggactatgctcagaaagttttggctaagatggaaaaaaatcaagatgtgttgattgggtattctgattattttgaagaaaaagacggccataaaattcctgcgaatacaaatctgaagatcaaaaccttgatgttaaaaaccatgaatctttttcctgctagtcacttttggcgaaaccgtgtgatggcttttgggaatccgatttgttgtccagctgttacctataatcgtgaaaatttgaagaatttctattttgatgaaggaatgagagtgagtttggattggtacgcatggtataagatcagcgagtataaaggtcgttttgcttatgtatctgacaagctcatgtgccaccgtatccatggagagtctgaaacatcaaaaaccattgcagacaatacgcgtagtaaagaagatctatacatgtaccaactcttctggcccaaatggatggccaagttgttgatgagacaatatgtgaagagtcaaaattcgaataattagaagtttttataataagcggctctaaagggtcgcttttctgtttgtattaggcaaaaagcctagaaaatggtataattgaatagactgtgaatgatttgaaagggaactctatgcaacatgtttttattatcggaagtcgtgggcttccggctcaatatggcggttttgagacttttgtggaccaattggtttcgcatcaagtgtctccagatatccagtaccatgttgcctgcctttctaatgatcaagcctattatcattttgactacaagggtgtcgattgttatacgattaaagcacctaagcttgggcctgcgcgtgtcatcgcctatgatatgatggccatcaactacgccttgaagcttattaagaaacaaggaattgaacagccgattttttatgtcttgggcaatacaatcggagcctttgtggcgccttttgcgcgtaagatccataagatgggtggtcgattctatatcaatccagatggactggagtggaagcgggccaagtgggctaaaccgatccaagcctatctcaagtattctgaaaagatcatgacgcgccacgctgatttggtaatttcagacaacccaggtattgagtcctatatcaaggaagcctacccttggtctaatacgacctatattgcctacggaacggacttatctccgaccagcctaaacagtcaggataggaaggtccgagaattctatcacaagtggcagactcaagagaaaaactattacctaattttgggccgctttgttccagaaaataattatgagaccgccattcgtgaatttatggcctcttctaccaaacgggatttggtgattatttgtaaccaggaaggcaatccttattttgaggagctccgagctcgaactggatttgatcaggatcctcgtgttaagtttgtaggaacggtttatgatcaagacctcttgaagtatatccgtaaagaagcctttgcctatatccatggtcatgaagtgggcggaactaatcctggtctcctagaggctcttgcccagacggatctgaatttagttttaggggtctcctttaaccaaacggtcgctaaggattcggctcaatattggactaaagaaactgggaatttggcacatttaattgatcaggtcgattctatagaagatgtatctgaatggggtcaacgagccaaggctaatatgaagcaaaactttacctgggaaaaaattgtaggtgagtacgaggaattattcttatcatgaaagtaaatatcttgttgtccacctataatggtgaacagtatctaaaagagcaggttaaaagtatccaagaccagacttatcaagactggcaactcttgatccgagatgatgggtcaagagatggtacggtgaagattattcaagatttggttgcccaagatgagcgcattcacttcatcaaccaaggagctatcgaaaatctcggtgttatcaagagcttccatgccctcttgaaatatgagaaagcagatctctattgcttcagtgaccaagatgatgtctggcttcctgaaaaaattgctcttcaagtagcaaaagcagagaagcatcttcaagaagagcctttgctggtctatacagatttaaaagtggtcgatgaaaacttgaacgtgcagcatgaaagcatgattcgcacccagtctgatcatgccaataccgaactgattcaagagttgacggaaaatacggtaactggcggagtggccatgattaaccacgcgctggctgacttatggacaggtcaagaaaaacatgcgctccttatgcatgattggtatttggccttgttggcaactgcctttggcaagctcatctatatcgatcaaccaacagaattgtaccgtcagcacagtagcaatgttctgggtgctcgaaccctcagaaaacgggttaaaaattggatccgaccccatgtgctgtttgccaagtattggaatctcatagagtctagtcaagaacaagcaaaaaatctattggatctgcctgtcagttcccaaactaaagaaattattgaaaactttgtcaccattatggatgttccactaaaagaacgtctgagacggattcgtcagtatggttatcgtaagaaccgagcctttcacacctttgtgtttaccagcttgattctgacaaagtttgcatatcgaggtaaaaaataatgtttgacgtttttagtcagaaaaatcgaattttattacgagaattaatcaaaacagactttaaattacgctaccagggatcagcaattggttatctttggtcgattttaaagcccctgatgacttttacgatcatgtatattgtcttcatccgattcttacgcttgggtggagatgtgccccatttcccagttgccctcttgttggccaatgtaatttggggcttcttctcagaagcaacatccatggggatggtgtcgattgttagtcgaggcgacctattgcggaagttgaacttctcaaaacatatcattgtcttgtctgcgatttcaggagcagccattaactttgtcattaaccttgtagtggtcttgattttttcattcttcaatggggtgacattctcttggacagccttgatggtcattccgttgttttttgagttattcttgatggcgacaggatgcgcactgatcttagcgacattttttgttcgtttccgcgatcttggacaagtctgggaagtactcctgcaagcaggtctatatgcgacgccaattatctatccgattacctttattgcagaccgcaatccatgggctgctaagttggtcatgatgaatcctttggctcaaattattcaagacatgcgttacttcttgattgataaggccaacacccctgtctggcttttggtggaaaataagttcttggtactggttccttatattttaccaattcttatttttgttgctggctttgcttactttaacaaacatgctaagaaatttgcggagattctctaatgacagataaacaaattgcagtaaaagtagaccatgtcagcaagtactttaagttgccaacagaggcaaccaatagtcttcgaactgccctggtcaatcgcttcaaaggaatcaaaggatacaaagaacaacatgttcttaaggatatttcttttgaagtagaaaaaggtgattttttcgggatcctcggtcgaaatggttctggaaaatcgactctcttgaaaattatttctgaaatctatgtgccagaaaaaggtactgtcactattgatgggaaactggtgtcctttatcgagcttggagtaggctttaacccagaactgacaggtcgagaaaatgtctatatgaacggcgccatgcttggcttttcaacagctgaaattgatgccatgtacgatgatatcgtagactttgccgagttgcatgaattcatgaatcagaagctcaagaactactcatcaggcatgcaggttcgtctggcattttcggtcgcgattaaggcccaaggcgatatcttgattttggatgaggtcctcgcagtaggagatgaggccttccagcgcaagtgtaacgattacttccaagagcgcaagaaatcagggaaaaccacgattctggttacccatgatatgggagccgttaagaaatattgtaacaaggctgttttgattgaaaatggtttggtgaaggctttagggagtccagaaaatgttgccaatcagtacagttttgataatacagctcctttgcaacagggaggagaagctaatggagcaggcaattccaaccaggaagaaaaagtcttggttgaaaattttcagcttcagttgttaagctcaaacaaattacgtcctcaagatcctattcagttccagattgattttgatgttcgtgaagatatcaggacctatatcgctctgtctttaacagatatcgatcggaacatttggatctacaatgataattctatgaatcaactgatgagtggaactgggcataaaacggttcattatacttgttcactgccaactgtaaatgacttaaaaatgaaattggaagtgacagtaagggatgaggaagggcagatgttggccttttcagatgccactcagacaccactgatctttatcaatcgagatgatattgctttggatgataaatcagcaatggattcggcaagtggcttaatccaacgcaatggaacatggtcaatgactgactagactgagggaaatatggaaacgacgccttttgtttcgattatttgtacggtttttaataaagagccctggttaaagaagacgattgatagcttcttagcccaacaaacagagtttgcttatgagattatcttggtggatgatgcttcaagtgatggatctcgttctatcattcaggattatcaagccaactaccctgatctgattcgcgccttttatcaggatgagaatcagggaatttctaaaacttgggtttctatctgtagagaagtgcgtggacagtatattgctcgctgtgacggagatgatttttggttggatcctttaaaacttcagaaacaggtttccttaatagaaagtaaacctgattgcaaatggtccaatacagatttcgatatttatgatgaaaaaggaactctcgtttctaaggctggctttgctaatcacacgattccgttagcggatacctatgaaaagatgcttgcaacaagaggctttactatggcctctacatggctagttgatagagatctgatgttagaagtcaatcaagagttagacctaacgacatcagatgatacttttaacctccaattggagctttttcaacggacttctttagcctatctggatgaagcgacggtagcttatactattaaccaaggatcggattctcgtcctactgatttcagaaaactagaacgccgatttcataagttattgcaaacgcaacttgagtatcttgataaatatccaaatgccgattttaaagagatgacgaagatccttttagatcgtaataatacgtatgaaattcgtctttctaaaccgatggattctctttcacacattggaatggagtctgttacaatttattttggggacgaagaaaatacttattcggaagatcgtaccatgaccaaacttcttcaaaaagaagatagtctagcaatagaaattccgaagggaactactgttatccgagtcgatctttctgaaaatcctagttattactctgatgttgaattgaaagattcgtcaggcaaggcttgctcagctatttatagtaatggcgttgttgttgataatttgtatttgtttagcgaaccggatcctcaattgatttatgaagttgaagaagaaggggtgtatcaactgagctataaaatgatttctatagataatccctctgcaccggattatattggaaaagtttttgttgccgaaatgttagattgtcaaaatagtttgaaaaatcttgagacagagttacaagctacgaaagaagaatataatacagtcatccattctcgccgttggacgattccaacaaagatcttgaaattcttaagaataaggaaataacatgcaacgtttacttttatatgtccacttcaataaatttaactttatcagtggacatgtactctaccaattagaaaacattcgtcccctgtactcacgggtggtctttatctccaatagtcagctaccagaaggtgtgaaggatcatttgtcctctcaacagttggtggatgatattcttgagcgccaaaatagtggctttgactttgcggcttggcgggatggaatgaagacagttggctttgaccaactggctcattttgattctgtcaccctcatgaatgacacctgctttggacctctttggaatctagagccaatttatcagcagtttgaaaatgataatgaagtggatttctggggaatgaccaattaccggaaagacaaggattttaacgagcatattcagagttattatcttagctttaaaaaacaggtgctgacatcaagtgctttccatgaattttggcaaggtgttcaggacttcaccaatgttcaagatgtgattgataactatgaaaccaaggtcacaacgaatttcttggatgctggttttcgctataagacgatctttgataccattcatgaagacaccacagggatgctctatccagacttttcttactataatcctacagcgattctcaatcataaggttcctttcatcaaagtcaaaaccattgcaaataacgaagggattatgccttatatttttgatgagttggagcgtgtttcgaactatccattagacttgattctcaaccacatgtctatgattgatcgtccggattatccttatctcttgtctcgtaagtacttgaaaaaacaagaattggctggagatttcggtaaaaaagttgcggttcatcttcatgtcttttatgtggacctcttggaagaatttctagatgcttttcgagactttcattttgattatgacttatggatcacgacagatgcagaagagaagaagcaggctattgaacaaatcctttctaatcgggcacaagatgcgacggttgtggtgactggaaatattggacgagatgtgttaccaatgctgctcttaaaagagcaactctcaaaatacgattatgttggccatttccataccaagaaatccaaagaagcagatttctgggcgggtgaatcttggcgcaaagaattgatcgagatgttggtcaaaccggctgatcaaatcctagccaatatggaagccaatccaaaagtcggaatcactatcgcagatattccaaccttcttccgttacaatcgaatagtggttgcctggaatgaagctcttatttctccagagatgaacaaactctggcaaaggatgggggcgaccaagacaattgatttcaaaaatctcaatacctttgtcatgagttatgggacctttatttggtttaaatacgatgctttgaaaccactctttgatttgaatttgacagcagcggatgttccagcagaacctcttcctcaaaattcgatattgcatgcgatcgaacgtttgttgatctatattgcctgggatcaaaaatatgactttaggatctctcaaaacccacatgttctgacaccatttatcgataataagcagttgaacaatcgcgaagatcttcaaccccatacctttgtagactttaatcaaattggggggatcaaaggagccttgaagtatatcgtaatcggtcctgcaagagctgtgaaatatatactaaaaagaatgataaaaagaaagtagagtaaattatatgggagttattgataagactaaaattagaaatattttaatcgctatatttttagtattattttcaagggtgtttttggctagtttatttcaatttactatcaatcttaaaattatacttttaattattagtatcgtgatgtattttattctttttgatccaaaagacaaaaagaaattgccaattaatgctttttttctgataattattttcggtagtgtaatttcagtagtgaaaccagtccaatatggattagatgaagagtctcatttaccaaacgtaattagtatttctgatagtcctatttttaaatattccaatgagaaattggaagattataattcagtttttaaatatgatgcactaagaaatcctagtaaaaaagataaaaattattggtttaatgttgagcataaggaaagtaaaattaaaggagtaagagttggatttgataatccagccttcattcctagtgcaattggatggaatataggtagattaatatctaaaaaagtgtttgtttcctattatttgggaagaatcttcgaagtaatagcatatgccattctagtatttattgcattaaaaatcagcaaagtttatagaggagcgatatatttattttctacattccctgcagtattgtacatcatagcaggttatcattatgattatttatattttggagcaactttaattagtcttgctttattgacaaatatactatctggtgaaaataaagttgataaaaaatatactattgcatttcaattttccacatttctattttcatttgcaaaatttccgtttgtattaattggaagtctattttcaatattgccaaataagtattatcaggataaatcagtaagaaaattcagttcaatcttgtttggtttaaatttattaatttcctttacatacgttggaatcattaaattgtttgcttcagacaacgctttgtcaggcaaaggcccaggactattatattttgtaacacatccattaccattaattagaactttacttttagcaccatacggtattattcatgactttgtttctgaaccattgaaatatgtttcagaatcgtctccgtttttaattgcaatttcgatagttattttctttttcgctatgtttgtaattgcattaaaaaataaaattgaaatgccaacattttttaaatattactgtcttcttttacttgcaggtattgcctcattaatagtaattgctatttcaggagatccgagggtatatcacaaaggtgatattactgtaggtggtgttcaaggtcgatattattattatattctgatgttcttgccactcttttgtggatcatggtttagaaaactatttggttttatggaaacaacaattcagaatgaagattcgaactttgaatgcagcttgcagtatatgttagtgtatttaaacattttaacaataagtattggtatatacactcaattacagggataaaaaaacttttaggaaggataaaaaatgaaaagaaagaggaaattagactttagagattttctttttaaaatttttaataaaataacaagaacacaaaagtattgtattgctctctttcttttattttttataagcaacactttcttaacacaaaatttgatttctaaagaaattaaatcgacaggatctgtattatttctggttaatcagtgtggtatttggtttggaatttcatttttaattttagttttactaatttcacaatacactttaaaatggttttttttccttaagattttagtttcatatgtaatctatttaatactatcttactcgattgatgtttcgcttaatatcaataatcctagttataagattaatgattttgaaaaaaataatttttggcaatttaattctctaacttttgttttaacattgttagtgatttcttatgttttgggacagattagaaaatcatatgataataaagcaaacagaaaaaaattagaacctattgggaaatggttcgaatatgtcttgcattctagcgtagtttgttcgttcatttttactgattctaaaattccttctctattgtatcgtacatcatggtatgtatctggaaattttgagaatttaggagcgggaaagtattccttgagccaattttggattttagaattttatttgctattcttaagtattttcctgactttagttggcctgctttttgttaagggacaagttgatgtagtaaaaaataggtctagtttttcgctagctatatttacaagtattagtcttgcaatattatttaatgcaggaatacaattgggtctaggtcatggggaacctttggttggatactcaatatttcctggaggtgtaatatttcagatattatgtttatcttatctgtttatttttctatatataatctttaatagatatttatttacgacaatattgattttatttggtggggttctgtttattgttgctaatgctataaaatttagtatgcgtgcggaaccaattttgccaagtgatttggtttgggtatttcaaccttctgttttatttagttttgtagatgtctcagttttaatgactgtgagtatttccttagtgatttttacgtttatttatataattggaaggagatatatttatccaggtagaattattcgcgcaacaatcttaagatttgttttattaggacttatgctcttattgtccattaatgtttattctatttttaaaagaaaagataacggtaaaattatagatgatgttccgattattaccttgctaaataatttccaagatacaaagtggttagggaattctataaatgctagatatcgatcgttgtcatatgtatggttaaatcagataactagtgatccaataatagaacctaaaggatatagtgaagaaaaaattaaggaaatcgagaagaaatacaatcaaatagctttaacaataaatgaaaatagaaatgagttaattgagaatcaaacgattgtttatgttttaagtgagagttttgctgacccagcaagaatagagggagtaaatttatctagaaaccctataccaaaaattcaagaaattaagaccaaagttacaagcggattaatgcaatcggatggttatggtggtggaactgcaaatatggagtttcaaacattgacggggttacctttttataatatcaatcctacagtttctgtattatactcagaggttgctcctaaaatgagaagactaatatcagtcagtgattcatttaataataaagaagttattcatttcgaatctccaattaattattctagaaatgtaatttacaatagattgaaattcaataaatttataagtattgatgataaaaagaattatgatttaggttatcaagaagtgcatataagtgatgaatctacgtataaggtagtgttgaaagagatggatgctaaaaagaatcagttcttttctgtcattacaattcaaaatcactccccatttatagcaggagaaccttcagacttaacagcaacagccaaaggattttcggatgatgaaaatacaaagttaacaaattattcacgtcttttaaccttcaccgacactgccacccaatccttccttgaaagtctttctaaaatagataagaagattacagtggtgttttatggggatcacttgccaggactttatcctgagtcggcctttaagaataatccggagagtcagtatcagacagactacttcatttggagtaattttgatgctccaaaattgaattatcctttggtcaattcaagtgatttctccgccatggtctttgaacaaaccaattcaaaagtttcaccttactatgctttgttgacagaagtattaaaaaaagcaagtgtcgataaaaaggccttagaaggagaagcacaagagattgcggacgatttaaaaatggttgaatatgacttgattagtgggaaaggatacctatctaaagacttctttaaaattccaaccaactaatcccattaaagggagagtcagcagttaaaaatctttgtgtttttaactgtcggactcccttttttttgctttttatgctaaactattagatgggggtatgctcatgattaagatatttggaaaggtccattatcattggcaaccggacttatctattcttgtgacttattggtccattgcagtgattccggtctttattggactggccttgatgtatgagagctctagtgtgccaacgctagttttgttttcgttctttttatttatggtcttgctcgcgattggagttcatcgttactttactatttatgatgatgggattttacggattattacagccaatccttttaccccaattaaagtgaagatcacttccattgagaaagtagaagtgaataagaagtctatcaaactcgtctttaataatggttcgcgtagtcggacattctgtatgcgcaaatggccgaaaaaatactttatcaatgcacttgccttaaatccctattttaagggggaagtagttttgacggataactttattcatgtggactactatgagatgtattatgcagacaaataaaaagccctcttaatcttttaagagagcatgagtggggcattctctgatagcctcgagaacatcgtttgtgagagggacttctttttcgaggaggtcgtcctcttcggtaaatttgacgataccattatcatggtaatcgaacaactcagagtaggtttgacagagaccgcaagcgatgcaacgatctggaattaacgtaactttcatacttctattgtaatgatttttacgagaaaaaacaaggaggaagtcatggcaaaagaaccatgggaagaagacatttacgatgatggagaagaaacattgaaaagaacgagtaaattaaatggagtgaaggctgatcgtctcttaacgattttggcgattattttctttgtggtggttgtggccatggtgtgtttgttgattttcctttctaccggaggaagcgacaaatcaaaacaaatggctggtttctacaatggagagactaaggttgaacagacatcatcagctcctgtagcacagacggaccaagcagctactaaagatagttcaaaagatgagaactctgaagaaggcacgatcactgttcaagcaggtgaaggggaagcagcgatcgctgcgcgtgctggtatttccattgcccaattggaacagttaaatccatcccacatgtctacaggatcttggtacgccaatcctggtgatgtcgttaagattcagtaggagtagagaatgaaacaaattcaaattgctattgatggccccgcttctagtggaaagtctacggttgcaaaaattattgctaaggatctgggttatacctatttggatacaggagctatgtaccgtgcggcgacttacctagctttgcaaaataatttaacagctgaacaggttgatgacctcttagatcttttagatcagtatccaattagcttcggtcgttcggaagaaggagagcagcttgtctttgtagcagacgtagatattactcacccgattcgcgataaccaagtgaccaacaatgtttcatgggttgcagcacttgcgccagtccgtgaaaaacttgtcactctacagcaagcaattgcagcagaggggggcatcgtcatggatggtcgtgatattggaaccgtcgttcttccacatgcagagttgaagatctttttggtcgcttctgttgaggagcgggcagaacgtcgttataaggaaaatgttgagaagggcatcacagcggatcttgaattgttgaaaaaagaaatcgctgagcgggactataaggacagccaccgtgccgtttctcctttgaaacctgcagctgatgccattcattttgatacgacgggtgttggaattgcagacgttgttgcatttattgaagaaaaagcaaaaaaacttcttgacaaagaataaaaaacttgatatcatataaaagttgagaaaagcagaagtgagaacttctcgccttgtgacgcaagttgcctggcccctacggatcaagtttcagtaatgaaatacatcatgtagttcgggcctgttttgcaggtccgttctttgtttttctcgaataataaaaaagaggtgaaaaccatagcaaagcaagacttattcatcaatgatgaaattcgtgtacgtgaagttcgcttaatcggtcttgaaggtgagcaattgggtatcaaaccacttagcgaagcgcaagcacttgcggacgacgctaatgttgacttggttctcattcaacctcaagctaaacctcctgttgcgaaaattatggactacggtaagttcaaatttgagtatcagaagaagcaaaaagaacaacgcaaaaaacaaagcgttgtgaccgtgaaagaagttcgtttgagcccagtgattgacaagggtgatttcgatacgaaacttcgcaatgctcgcaaattccttgaaaaaggaaataaagtgaaggtatccattcgctttaagggtcggatgattacccacaaagagattggtgctaaagttttagccgacttcgctgaagcgacacaagatgtggcgatcatcgaacaacgtgctaagatggatggacgtcaaatgttcatgcaattggcgccagcaactgacaagaaataatctgtcagaaagttaaaaaaaggagaaaatatcatgccaaaacaaaaaacacaccgcgcatcagctaaacgtttcaaacgtacaggttctggtggacttaaacgtttccgtgcttacacttctcaccgtttccacggaaaaactaagaaacaacgtcgtcatcttcgtaaagcatctatggtgcatgcaggagatttcaaacgtatcaaagcaatgcttactcgcttgaaataatcgcgtattcataagtaaagaattctaggaaatattggaggaaatataaatggcacgtgttaaaggtggcgttgtatcacgcaaacgtcgtaaacgtattcttaaattagctaaaggttactatggagctaaacatatcttgttccgtactgcaaaagaacaagtaatgaactcttactactatgcataccgtgaccgtcgtcaaaagaaacgtgacttccgtaaattgtggatcacacgtatcaatgcggcagctcgtttgaacggactttcatactcacaattgatgcatggtttgaaattggctgagatcgaagttaaccgtaaaatgcttgctgacttggctgttaacgatgcagtagctttcacagctcttgcagatgcagctaaagcaaaacttggtaaataatttttataagactgggaagattttctcagtctttttttcttgctgatttcatgctataatgaaatcaattataggagaaatcatattagatggaggacctaaaggtgacacacaatcgactagcatgggatgagtattttgcagcacaggccttactaatttcaaatcgggcaacttgtaatcgcgctaaggttggggctgtactggttaaggataataaggtcattgcaacgggttataatgggtccgtttctgggacagatcattgcttggaggatggctgtctaatggtcgaggggcattgtgtccggactattcatgcagaagtcaatgctattttgcaaggagctgaacgtggtattccaaaagggtttacagcttatgtgacgcattttccttgtctcaattgtaccaagcagttactccaagttggttgcaagcgggtagtatacattcatcagtatcgaattgatgaatatgccgagtatctctaccgtgaaaaagaagtagaactgatgcatttaccgattgaagaggtgaaacaggcaattgcagagacagaactggtctagtttgtactttttttgaagtgaagactgatggatactgtaatgaggggataggtatatctccaattcttctggataagtagaagagaatgacggcctcaatcttcttgaatttatttagtttatttatcgaattggaaggaatttggattacaaccttttttcctattcatatctttattgctagtaaagaaatatgtctgctactttcaagagtgatatagattgaaactatatcaactccttttttaaaacatagtctatcatagttgaaatgtgttataatgaagtgttatatggtcccgataaggtgatagtctttctatcagtgctttgtaactctataacgaatatttattttaaggggggacatttttatgtcagaacgtaaacttttcacgtctgaatcagtatctgaggggcatccagataagattgcagaccaaatttcagatgctattttagatgctattttagagcaagatccagaagcacacgttgctgctgaaacagctgtttatactggttcagtgcatgtcttcggtgaaatttcaacgactgcttatgtggatattaaccgtgtggttcgtgatacgattgcagagattggttataccaatacggaatacggattctcagctgaaactgtaggagtacacccatctttggtggagcaatctcctgatattgcccaaggggttaatgaagccttggaagttcgtggaaatgcggatcaagacccactcgatttgatcggagcaggagaccaaggtcttatgtttggtttcgcagtggatgaaactgaagaactcatgccattgccaatctcactcagtcacaagttggttcgtcgtttggcagagcttcgtaagtctggtgaaattagctatcttcgtccagatgcaaaatcacaagtcactgttgagtacgatgaaaacgaccgccctgtgcgcgtggatacagttgttatttcaactcaacatgatccagatgtcagcaatgaacaaatccacgaagatgtgattaacaaggtcatcaaagaagtgattccagcttcttatctagatgctgagaccaaattcttcatcaacccaacaggacgctttgttatcggtggacctcaaggggactcaggtttgactggtcgtaagatcatcgtggatacttatggtggttactcacgtcacggtggtggtgccttctctggtaaggatgcgactaaggtagaccgttcggcttcttatgcagctcgttacattgccaaaaacatcgtagcggcaggtcttgctaagaaagcagaagtgcaattggcttatgcgattggggtagctcaacctgtttctgttcgtattgataccttcggtactggaacagtcgctgaaagcaaattagaagctgcagcgcgtcaaatctttgaccttcgtcctgcagggattattcaaatgttggatttgaaacgtccaatctaccgtcaaacagcggcttatggccatatgggacggacggatatcgaccttccatgggaacgtttggataaggtagaagccttgaaagaagctgtaaaataattagttgaaatggaaaagttagggtcaagatgatcctagctttttttcgttttgaaaattcctacagatggaaaaataggtcgatctgtggtataatagttagagtattttaaatacattgtcccttttatttccgttgaaaaaacgatagtaaaaggaaaaagacttgaaagagctaataattattaagatgaaaaaaattgtaataaatggaggtcgccctctaaaaggagaggtgaccattagtggtgcaaaaaatagtgtagtggccctgattcctgcaaccattctggcggacgatatcgtgaccctcgatggggtaccggatatctcagatgttgcaagtctgattgaaatcatgaccatcatgggcgctaagatcgaacgcaaagaagacagtttgatcattgatccacgtggggtgaaggatatgcccatgccatttgggaaaatcaatagcttacgagcttcctattatttctatggcagtttgttagggcgctatggtcaagcaactgttggactacctggaggatgcgatctcggcccacgtccaattgatttgcatttgaaggcctttgaagcgatgggagccgctatgactatggatggctctagtatgaaacttgcgacagatggcaagcctcttcaaggagctaacatctatatggatactgttagtgtcggtgcaacgattaatacgattttggcagcggtcaaagctaaaggtcggacagtgatcgaaaatgctgcgcgggaacctgaaattatcgatgtggtgaccttgctcaacaacatgggagctcatattcgtggagcagggacagatattattatcattgatggtgttccgcatttgcatgggactagacatcaagtaattccggatcgcatcgaggcaggaacctatattgctcttgcagctgctattggggaaggtatccagatcaataatgtcttgtacgagcatttagagagctatattgccaaattagaggaaatgggtgtgcgcatgaccatttctgaagatagcatctttgtagaaaagcaaacaggcttgaaggcgatccagattaaaacttctccttatcctggttttgcgactgatttacaacaaccgatcacacctttgctcttaacggctgcaggacgtgggcgaatcgttgatacgatttatgaaaagcgggtcaaccatgtgcctgaattggctaaaatgggggctactatcttgactttgaacgaccacattatctatgaagggccaaatcaattgacgggatcaagtgtgaaagcgacagatcttcgagctggtgcggctttagtgatcgcaggtctcatggcttctggaacaacagaaattacaaatgtggaatacatccttcgcgggtattcagatattattcataaattgacccaacttggagcagatatccagttgatcgaagagtagtgattgaatctgagatctggtagtggtgcctggatacatgaacattggagtttgaaatgaatatttggacgcacttagctgcctattcactgattgaaacacaaaggttgtacttacgaccttttctctttgaggatgcggaagatttttataagattgcttcgaatcctgataacctacaatttatctttcctgcacaagctgatcttgctgaaactcaatatgtactagccaactatttcataaaaaatccattgggggtttgggcgatctgtgataaggaaaccaatcggatgatcggctccatcaagtttgaaaagttggatgaaatcaagagtgaggctgagttaggctactttttacacaaagattattggggaaagggcctgatgacagaagcggtcaaagagttggtctatctatcgtttgagaaatttcaactaaaggagcttaagattgtcacccatgttgaaaatatagggagtcaaaaggtcgctttaaaggctggatttcgtctctttcgtcaattcaaagggagtgaccgctatacgcgtaaaatgcgcgattattatgatttccgcctaggtagaggggacttctatgagtaaacaccaagagattttagactatctcgaaaaattaccaattgggaaacgggtcagtgtccgcagtatctccaattttctgaatgttagtgatgggacggcctatcgtgccattaaagaagctgaaaatcaaggaattgtcgaaacgcgtcctagaagtgggaccattcgtgtcaaatctcaaaaggcagtactagagcacttgacttatcgggaaattttagaaatcactggatctgaaatattagcaggtgaggaaggtctcgaaaaagaatttaataaattttatatcggtgcaatgacggagaagcacgtcctagactatgtgtctgaaggaggtcttttgatcgtgggagaccgcactagcatccaacgattggctcttaagcatgacaatgcggtcttagtgacaggtggctttgaggtcagtgaggatgtgattgatctggctaatcaggtaaaaatcccagtcatacgaacttcacacgatacctataccgtcgctaccatgatcaataaggctttgtctaacatgcagatcaagacggatatcttgacagtagaacaggtctatcggcccttccatgaatatggttatctttcagagacggatacggtaagagactatctggatttggttcgaaaaaatcgctttagtcgctttccagttgtcaatcagcaccagatggtggtgggcgtcgtgaccatgagagatgctggagataaggcgcctcagacgacccttgataaggtgatgtcacggacgatctttaccactaaattgtctactagcattgcgacgattagccaacggatgattgctgaagattatgagatgattcctgttattcgcaataatcagaccttgctgggtgttattacacgtcgagatgtgatggatcggatcagcaaggtacagttttcaagcttaccaacttttagtgagcaaatcggacaaaagattctaacggagaataatcattaccaattcacagtggagccaagtatgcttgaaaagagtggtgttttggccaatggggtcatgatcgaagttctgatgaagattgttcgtaagctaatgcaaaatattgggcgtaacctgatcatcgaacagctgatcatcaattttttacaggcagtacaggtagatgatgtgattcgcattgaaccacagcttgtccgccgaacaagacgttctgccctagtcgattttagtttgtatttggacttacaactgatagcgaaagcaaccattacgattaagattaattaaacaaaaagaaatgaggagacgatgattacattaaaatcacaacgtgaaattgaagccatggatcgtgcgggagatttccttgccagcatccatattggattgcgtgacttgatcaagccagggcttgatctttgggaagtagaagaatatgtccgtcgtcgctgtaaagaagccaatgtcttgccacttcagattggtgtagaaggcagtctcatggattatccttatgcgacttgctgtggcttaaatgacgaagtggcccatgcttttccacgtcacgtcatcttaaaagatggtgatcttctcaaggtagatatggtcttgtctgaaccgctggataagtctgttttagatgtttcaaaattggattttgataatgtggcgcaagtgaaaaaatatacagagtcctatactggtggtttagctgattcatgctgggcttatgctgttggaaatgtttcccaaaaagtcaaagatttgatggatgtgaccaaagaatgtctttacaaaggaattgaaaaagcggttgttggcaatcgcttgggagatattggtgcagcgattcaagagtatgccgaaagcaaaggctatggcgtggtgcgtgatttggtcggacacggtgtcgggcctactatgcatgaagaaccaatggtcccacattacggtcgtgctggacgcggtcttcgtctgcgtgaagggatggtcttgacgattgagccaatgattaataccggtacttgggaaattgatacagatatggaaactggttgggcccataagaccctcgatggtggcctttcttgtcaatacgagcatcaatttgtgattacaaaagatggtccggtgatcttaaccagtcaaggtgaagaaggaacttactaaaagatagagaggaaagaatggagctgaaggcaggtgtctggtttcgctctttgctcttttttagtaaaacggggaggtgacggatgaaaaaagtcataaaaaaagtgctagatcagccgtttataaaaggcttcgtgcgattttatcagagtgcagagtctgatatcaccagcattgcggttgcctattatttgttgatctccattttccctttgatgctgattgcagccaatattttgccttactttcatattcgtcctacccagattcttttgagcttacaaaaagtcttgccagcttccttatatcgaatagtggcacagatgatttcgagtgtgttgaccaaaccctcaacaggattactgagtttttcgattgtttctgctttgtggatcttctctcagagcattgcctacctccaaagggcctataacaagagttatggggtggaaaaggagcgtggcattatctggggacgactctttagctttctgatcagttttgccttgcagggcttgtttggactttcgctcattctttccatgtttgggaaaatgatcgttcgctatctctatcggaccttttcatttgatcggacgatttatgtgcgcttactgaatttgacagagccgaccatctatctcttgctctttgtcagtctggtcttgctttattatactcttccaaatgttaaaattccgaaatttagatatgttcttccaggagcgaccttcgttgttgctgtcctgtatgcgatcttgaatatcttttggaaatatgtggatcgttatgtgagtcatttcttagatgctcgtttcttcggttcggtcgtcctagcggtcatcatgttctggttcatcttggtagctaaaatcatgattattggttgtattttaaacgccagtatccagtttgctagagaagccaagttccaaacgcgcaatggagaaattgtctctaaattaaaaacggaagaagtagccttttggcataaagaagcttcacaaaaattaaagcgtcggttacgcttgagaaaaaaagataaaacggaataaggagagtgggacagaaatcggtaattcgttagaattcgatttcgttgtcccacctccgcacagttgagtaggactgtaaaagctgatgaaatcagcgtagtagagcccactcaaccactgcgtcttgctcgacaattcaaaaataattgagaggctaggacttttgtcccagtctcttttttgccatctatttttgttgcatttgcaacaaaaatgtgttatgctattgtcaataggaaaggaggagtgagatgagtattttgcgtgagattggcatcattgcgcgagcactggattctatagcaaatattgaatttcgagatttggatctagcgcgtggtcaatacctctacctggtgcgaattgccgagcaacctggaattattcaggaagaactctctgagctcttaaaagtcgatcgctcaactgttgcccgatccgtaaaaagattagaagaacgaggactgattcagcagcgtccaagaggtgaaaaccttaaaaccaaggaatgggaattaactgaaaaaggcaagaagatatatcccttcattttaggggagcatctttattctgaggcaactgccttaaaaggattttccaaagaagaagtcgcacagttagagaagtatctgatccgagttcgtgagaatattaccctagattgggaactagtcaaaaaaggtcaaaaaagaaattatagtgaggtaaagcaatgaaagtaacagttgatcaagcattttgggatttatttccaacagctagaattacagtgatgtccctgtatggtattgataataaagtagatgaagccaaggatccttatttcaaagaattgttggacaagggtaccaagagagcatgggaatttattgatgaagaaaactatacccagagtgagttcgttcaagagtggcgccaagcttttagcaagtttaaaacaaaaaaaggagcccgatcttcaatcgaggcactcttaaaacgggttcaccagggacgtgaattctatccgattaatcctttggtggatctttacaatagtgtttcgatggcttatgcccttccttgtgggggagaagatatggataaattggtgggtggactctctctaggccaagcgaaaggaggcgaacctttctttccgttaggagctgaagaagatgcgccagctttggaaggggagatcatctactacgaccaagaaggagccgtttgtcgttgcttgaattggcgtgaggctcaaagaactatgctaacagaagataccaaggacgcaattttggtgattgaagccatcaatgaggagcaggccaaacgggcacaaacagctatgcaggaattgaaagatctagccaaggattattttggggttgaaggtaccatctatcaattaagtgcagagcatgcaagtatagaagtttaaaagaataaggctgaaacaatcgtttcaagccttgtttttatttttaaagacaaagagtttactaaagacataattgaggaccacaatggctacttgtgcaaagatggtttcaatcagattgatttggctcttgttattgtggacgaattgaccgataattcctgggaactgcttgacaaaaatctcggtcaaggccatatctagaataaaggtcccagagcgcgcaattgcaaatcggatcaagcgctgaaaccagccctttctttcttgtttaaaaacaatggtatcgttggtcgcaaaggcaaagaggatcccagcaatgtttccaatcgctgtcgctaatcgttcatcacgatacacatgatagatgaagaggcgggttacgacggaaacaagggttgtggcaactccaaaaaaaagataggataaaatctcattatcaaaaaattttttaattagtgttttcataaattcagtctaccataaaacctcaaaatatgctatacttgaaaggttgaagaaataacccttcaacccttggtgcttaagatcctttcgccaagcatattacacgcgggaaaaccgctaaaggagaatagatgaaacagttaactgctcgtgatatggcgcaaattgccattgttgctgcgatttatatcgtattgaccattaccccacctctcaacgctatggcctactatggctatcaattccgtgtttcggaaatgatgaatttcttagctttttacaataagaagtacttgattgcggtgacgcttggttgtatgattgctaacttatttagttttggatggatcgatgtctttgtcggtggaggttcaacctttgtcttcttaggacttggacttattctatttggtcgattcaaaaacaagttcttgtttgacggtcttattcgcttggaccatttcttgtttgcgattttcttttccatctccatgtttacaattgccttggaactttactaccttcaaggccaaccattcttctataactggttgactatgggattgggtgaattcgcatccttgatttttggagcgattgtgatcaatcaactttctaaacggatcgattttacaaaataagaaaagggagctttggctcctttttttcatgctaagaatgcagtaaattcaaggctaaattaagattttatgataaaataagaacatgaaaaccagaatgaaagaattagtggaattactcaatcgatatgcttacgagtattacacaaaagacactccatctgtttcagatagtgaatatgatcaattatatcgggagttggtggaactagaaaccgctcatcctgatgagatcttaccagagagtcctactcaccgtgtaggtggggtggttttaaaaggctttaccaaataccagcaccagtatcccctttatagtttgcaggatgctttttcgcgtgaagaattagaagcctttgatcagcgtgtccgtaaggaattttcttccatcagctatgtttgtgagctgaagatcgatggcttgtccatttccctcacctatgaaaatggtgtccttgtaacgggggcaacacgtggggatggttctgtcggtgaggatattacagagaacctcaagcgggtcaaggatattcctttggtgttaccagagccagtgaacatcacagttcgaggtgagtgctacatgccgcgggcttcctttgatcgggttaatcaaattcgtcaagaaaatggcgagcctgagtttgctaatccacgaaatgctgctgcaggaacgcttcgtcaattggatacgaaaatcgtggccaagcgaaatctcgcaaccttcttgtatcaagaagtgagcccgacggatcaaagcagtcaggaaggcgtgcttgagaaattagcccgcttagggtttgtcgtgaaccaagagcgagtgctggctgaggatatggagcaaatttgggactttatccaaaaagtagcccaacttcgagaggatcttccctatgatatcgatgggatcgtcatcaaggtcaatgacctagctgttcaagaagaactaggctttaccgtaaaagcccctaaatgggctgtcgcctataagtttccagctgaagaaaaagaagcgaaaatcttatcggtggattggacggttggccgaaccggagttgtgaccccaactgccaatctaactccagtccagctagcaggaactaccgttagtcgggcaaccttgcacaatgtggactatattgctgaaaaagatattcatcaggatgataccgtcattgtctacaaggcgggtgatatcattcctgcggtcttgcgtgtcgtcaaagataaacgggtttctgatcaagcattagccattccaactcaatgtccgagctgccagagtgagttgcttcatttcgaggatgaggtggcccttcgctgtatcaatccgctctgtccagcacagatgaaggaaggtttgaaccactttgccagtcgggatgctatgaatatcacaggcttgggtccagctgttgtagagaaactcttcgcagctcagttggtagaggatgtagctgggatctatcgtctgacagtcgaggacctattgaccttggaaggctttaaagaaaaatctgctgaaaaactctatgaagccattcaagcttcaaaagagaattcagctgagaagttgctctttggtttgggaatccgccatgtcggtagcaaggttagtcaaatcttgctccaagaattccatgacctcgatcaattggctacagctgatccagaacgaattgccagcattgatagtctcggtatggtcgtggctgaaagcctcaagcgttatttcgctcaagaaggatccaagcgcctattgcaagagcttaaagaagctagcgtcaatatggcctatcttggtgagaaagtcgctgctgatgcggccctatcaggaatgacagtcgttttgactgggaagctagagcgactcacgcgttcagaagcaaaggcaaaattagaaagtctgggcgctaaggtgactggatcggtttccaaaaaaacagatttagtcgttgcaggtagtgacgctggtagcaagttaaccaaagcacaagaattagaaatccaggtagaagatgaggcctggcttgaaagtttgtagaggatctttatggtagaacgaatcaaaaaagcccgtttaatttataatccgacctctgggcaagaaattatcaagaaaaatattgcggaagtcttggacgtacttgaagacgtgggctatgaaaccagcgcttatcaaacgactccagaaccattttctgcccaaaatgaagcagaaagagccgctaaagcaggctttgatttaatcattgccgctggtggagatggtacgattaacgaagtggtcaatggggttgcaggtctggaaaatcggccgcagatggcctttattccgaccggtaccaccaatgactatgcgcgtgccttgaagatcccgatgggagatcctgtggcggctgctcgcattatagaaaaaaaccaaaccattcaaatggatattggtcgtgcctatggcagcaagtatttcatcaacattgctgcagcaggaaccatgacagaattgaccttcagtgttccaagtagtgttaaatctcgcttgggttactttgcctatgtggcagaagctgctaaaatgttgccacgaaacaaggctcgaaaggtgcggattgagcacgacaatggtgtctttgaagggccagcgtctatgatttttgtggccttgaccaactccattgctggttttgaaagtgtcgcgccagatgctaagctcgatgatgggaactttaccttgattatcgtaaaaactgctaagctctttaacatgttgtccttgatgattcaggccattaatggaggcaagcatgtgcacgatgaaaatgtagaatatctcaagaccaagaagttgacgatcgaaatgttagggaaaaatgctcaaccattccgcatcaatctagatggggagtacggaggagatactccagttgaattggaagtcttccataatcacttggaattctttgcaaatattgatgaaatcaacaacgatgctttggttcacacatctgaagaataaaaacaaatagttagagccacgtacgtgtttcacgaggaatggttccttcggtattaaattggaaataggaaaatgttatgcgacaataccatgtaaagcttcattttcataagcaaaaaggaaattattttgcctatgatatgtggcagtggcaggatcaagtagaaggaaaatcagtctctttctccaagttggattattttggagtagagggaaatctggtatacgagagtgaggatgccttgaaccggggccatgtcctggttaaagaaggggattggctcactaagacccgtgattttgaaatcgaactcttaccagaagggcatgttcgagaagtatggattctcgatggagacgatacagtctattattctttgcaagctgctttgacgagtcatgcatacagccatcgtcagcctcatgcctacgatatggcgatgcgtcctagagagtttgatgctaaatgggcgtatcaaggctggctcggtcatcgggaggaagaaggggagcattgctttaaactgtgggctccaacggctaagaaagttgaattgttgctttatcaatcaaccgagctggatgcgcctatctggaagagtattccgatgacgcgtggtaaacaagattctagctaccacccagaaaatacccatggtgtttggattttagattttctaggaaatttaagtggcatggcttatcaatatcgtgtgcattttgaacaccatactcaagtgacgcgcgatccttatagcattgcaacgacagcggacgggatgcgctctgccattctttcaagagcagatcgtcagtttgattggggtcctaaaaaaggagccgatgcgactccttggcgcttggataacccttgtcaagcagtgatctatgagatgcaccttcgggatttgaccaagtcaccgacatcaggtgtggacgagtctttgcgtgggacctatctgggggcttgccaagaaggaaccgtcaatagccatggcgatgtaactgcctttgattatatccgtcagttaggagtcaatgtcgtgcaactgcagccgatctctgatcgctttaaacagtacgacgaagaaggtcgtgtgacctacaattggggttacgatgttcagaattattctgcaccagaaactagtttttcaacagatccatccaatccgaaacaaaccatgaaagagctcaaaaccatgatccgggcttatcatgaggcaggaatttctgtggtcatggatgtggtctacaatcatatctactcgaccgagcatggtcctttccaaaatacagtacccgattattattaccggatggagccggatggccgcttccaaaatgggacaggtgtcggtaatgaaacagctagtgagcatgaaatgtaccgcaagtacatgattgattccctcacgcactgggtcaaagagtaccagatcgatggcttccgctttgatttgatggggattcacgatgtaaggacgatgaatgctattcgggaggcaatggacgctctagatcctcgcattctcctttacggagaaggttgggatatgggaacaggtctcgcacccgaggacaaggctaagaaggacaatgcaacgcaattgccacgaattggattctttaatgatacggagcgcgatgccattaaaggggctgaggtttatggttccatcaaacgtggcttcgtcagcagaaaatcaacagagtatatcgttgcgcgtgctgttttaggtagtgcagagcttggcaattatttaagtcccaatcaggtcttgaattatgtggaggctcatgacaattataatctctatgacttgcttcagacccttcatccgaatgaagaagtagcaggattggtcaagcgctcagagttggctacggccatgaatctgctctttcagggcatgacctttatgcaattgggtcaagagttcatgcggaccaaattggtagcgacaggtcctgatggaaaaatcacacctttggattgtgaacgggccatgaattcctacaatgctccagattttgtgaatcaggtcaactgggatctggtcagtcagaacaaggaatcaattgcctatatccgaagcttgatcgccttgaagacaagtcttcctgtcttagggcttgaaagctatgataaaatctaccaacaagtctttatccaatctgcaactgattgtagtggacttctgatatttgaactaacaggagacaagaagtacttggtcatcttcaacgccagcggacttccatattacctccaaaattcagataaattgaaattgttggttggtaatagtcgtcataaacgaccattctatgtggagaatttaacagcttctatttttgaagtcctagatgaaggtaaagagtgatctttttaaagaaaacgcaaaatccctgagtttaaaaactcagggattctttttatttagaagaactgctactggtctctgttgaggaagaactatcgtcttctgggtgcaattctttataagttggtgccttgaagagatcgacggtggactgattgccacgttggttataaaggctggttgatttgtcacctttttccttttcaatcttcttcaatgccttgaaggaattggtgtaggaataatcttctggattgacttttccaagatcattgcccttgaagaagcgaaggaggtcaccggtctggatgctatcgctaatcttcaattgaaggttagcagcttccctgatcttgtccagttcttccttggttttttcgtctgggttcgtgatttcctcacctgttttggtgtaataggtccggccactatagctcgtatactctggagtaacaaagtagttagctgagcggaaggcgacgatttgatcatgttctggtgagagcatatcttgaccaacttggaggaatttattggattcaatacctagcaaatgttccaaggttgggagcatatcaatttcgccaccataggtatcaatgatgccacccttatccatacctggaacgactaccatataaggtacgcgttgcaacatggcattgtcatagcttgaccacgtttcagagttcttaccaagtagaggagcaagagctgggttgcgagagtttgaaataccgtagtggtccccatagagaacgatgatggaatttttgtaaagaccagattctttcaggtaatcaaagaaggccttgatcgaagaatctaggtagttagcggtcgcaaagtagccattgatggtttcgtcctgtgtcttagctagagggaagccaagatcatctcctgacaagctggtcgtataaggatagtggttggaaaccgtaatgaacttcgtatagaaaggttgttgcaatctttctaggtatttgatggaatccttgagcatgtatttgtcattaagaccatactggaaggaattgctgctgttttgtttggtgaagtagctggcatcaaagaagtaattgtagccccattgtttataggcggtatttcggttccagaaacttccagcattcccgtggaaaacagcgctcgagttgtaaccattttttgaaagaataaatggtgcagcctgttgggtattggttccaccatagttcaccataaaggaaccttggttgagtccgaagaggcctgtttcaatcatggtctcagcatcggacgttttccctgccttgacttggttaaaaacatttgaaaaggcaaaggtttccttcgagtggtaaagtgaatttaagaaaggtgttacttcatattctttatcatctactttcaacttgtaatcgatcaagaattgttggaaactttccaagtgaatgtagatgacgttacggcctttggccattccaaagtactcaggattaggcttggcataatgctgttggatatattcttccaccggttttagatctgcttcggaagctttggaacgttctttgttagcagcataggtctgattagcactgtaacctagaaaggctggtaagcctagggcacgaacgacatagtagtttgagaacccacgagtcaagagctcaggtcggtcaatttctgcaaggaaaaggttggccgaaaagagcatggctgataaagaggtaaccgcaaaactagctcgtttattgaagggacgattgtccattcgaatccatttcttaaagaagaagaaagctagaatagggaaatctagaatgtagatcacatcccaagggcggaacaattctaaagcagcagctccgagaccggcagaaaccttgctggaagccaacatggtattgaccgttacgaagtctgtaaactctcgataatagatggagttggaaatcaaccaaataaataagagaaggtagatcccaaaggccaaactataaaagagcttggttcgtttgatatagagtgctagaccgatgaagagcaaactgatcggcaatgggttgatcactgctagaaaaatctgatacggtccctgaatgtctaaattaaaatcaactgaataggcccacatggttttgaaccagtagagcaacagaagggtcaagacaaatcctagtctggtactcatgaaattgagtatcgaattcgtaatttttttcacaaaatgttacttccttgtcttatttcctaaaaattttcatatacaagtataccacaattttatggagaaagaaaaaaatgactgtaaagcagaggaaagaaataggaaagatcagatatatgaaatcgtaaaaagctaaaggataagagctgaaataaaatagcaaaaaaagttctagtaaataaagcctccctttgtgaaaacctcagacttttgctataatagagggtatgaaaaaactcacagtcagtcgccaagtcgcaacaaaaatcaaacaaggacaatctcttcttgaaaagcaagattttgagtcacttcctgctttggatcaagcggttcaattgctttcaggagatggacaatccctcggagtcggatacttgtctgaacaaaataaagggattggatggtttgtttcgcaagagttggtcgcttttgatcaagacttttttaaaaagcttttcatcaaagccaagcaatttcgtcgttcttattatgcggatgcaacgacgacagcctttcgtctctttaaccaagagggagatggttttggtggtttcacggttgacttatatggtgagtttgttgtcttttcttggtacaatcccttcgtatttcagatcaaggaaactattctagcggcctttcaagaggcttttccagaagtccgaggtggctatgaaaagattcgctttaaaggcttggactatgaatcggctcatgtctatggtaaagaagcaccgcaagaatttttgattcttgaaaatggagtttcttaccaagtctttctcaatgatggcttgatgacggggatctttttggatcagcatgaagttcgaggtagcttggtagagggcttagctactggcaagtccttgctcaatatgttctcctatacggcggccttctctgtggctgcggccatgggtggagcagttgagacaacatcggtcgatctggctaagagaagtagagaattatcagaagcgcattttgtggcaaatggcttggcgctggatgctcatcgttttgtagtgatggatgtctttgactattacaaatatgccaaacgccacgacctaagctatgatgtgatcgtgcttgatccgcctagctttgcgcggaataaaaaacggaccttttcagtcgctaaagattatcatcgattggtcagcgaggctcttgagattttaaatccaggtgggaccttgattctcagtaccaatgcggcaaatgttaacaaagataaatttaaaaaacaaatcgaaaagggatttcaaggtcgtaagcatcgctatgtagcggaatacggacttccgggtgattttcgatggaacaagaaagaagaaagtagtaattacttaaaagtatttacgattagggtggatgtatgaagttagttgtttcgattatgcctcgctccttagaagaggcgcaacaactagatagttcgcgttacgaggatgcagatgtcattgagtggcgtgcggactttttagaaaaaagcgagatcttaactgttgctcctgcagtttttgagaaatttgctggacgcgagattttattcaccttgcggactcgagctgaagggggagagatggagctgaccaacgaggaatatgttgggattctgaaagatattcaatccatctatcatccggattatatcgatttcgagtattatagtcaccgtgaagtctttgaagagatgttggaattttcaaatcttgttctcagctaccacaatttccaagagacaccggaaaatatgatggagatcttatcggaattgaccagtttttctccaaaattagtcaaggtatccgttatggcccataatgaacaagatgtccttgatttgatgaattttacgcgtggtttcaagacgctgaatcctgagcaagagtatgtcaccatttccatgggcaaggtcgggaaaatttcacgtttgacagctgatttgacaggatcttcttggtcttatgctagagttggagagggaagtgctcctggtcaaatccctcttgaaaatatgagaagaattcgggagttattgaatgaagattgatggctatactcggatggctgcagtcattgcccatcccattcgtcatagtatctctccttttatccataatctagcctatgaattaacagcgaccaatgctgcttatctagcttgggatattgctgaagaagacttagaaagcaccatcagccaaattcgtaagttggatatgattggagccaatatctccatgccctataagcagaaggtctttccttatctagatgaagtggatgagatggccctaaagatcggttctgtcaataccattgttcaccgtgctggcaagcttaaaggctataatacggatgggattggtttctttcgcagtttacctcctgctttctctattaagggaaaaacaatggttctcttaggtgcaggtggtgcagctttagcgattattgcacaggcgattcatctaggtgtaaaacgtatccttgtctttgtgagagaggagagattggttcattatcgttcaatagttcagttaattgaagatggctttgatttcttgatagaattgtatgcgattgagaaagatgaagaagttcaaaactcttttaatcaagctgatcttatcttaaatgccactggtgttgggatggatggtcaatctcttccgatagcgagtcacttgacctttcccccacaggccttaatcgtagagatggcttactatccagcagtgaccccctttctgcaattagcagtgaatcaaggaaaccagagggtaaatgggctgggaatgctcttttatcaagctgaagctgcctttgaattaatgactgggaaagtatttcctacagagtctgtatgggaagcattgacaacagaatatcgccaatttgtatgggactaagagagggttttaccttttcctattgaaaaagctttatgagattagaacaggaactgattttttaaaaaacagtcttgctctagtctctttttcattttgattgagacatgtgccctatttcatgataagatagaatcaaagaaaaacgtgaaggagattcctatgaacgtatcggtacctattccaggacattcctatgatattgtgattgaaagaggtggtttcaaccaggttggagactggttgcgcactctttggggcgataaaaaagtcgctatcatttccgataaccgcgtggctaagctatatgcctcaatcgtagagaagagccttgagaaagctggttttcaagtggtgcgctttgagtttcttcaaggggaagcaagtaagaatctaaccactgtttcaaaagtttatgaatttctagctacccagggcatgacgcgcagtgatggaatcgttgctcttgggggtggcgtagttggtgatttggctggttttgctgcctcgacctatatgcggggaatttcctttgttcagatcccgactagcttgaccgcacaggtggattcttctatcgggggaaagactggagtcaacacagcacttgccaaaaacatggtggggacctttgcccaaccagacggtgtgttcattgatcctgaagtgttgagcactttagggcaacgtgaattgatcgaggggatgggcgaagtgatcaagtatggtctcatccaagatacggaactttgggaagaattggaagccatggatggttctgtccagagtattttagagcatgcagagagcatcatttcccattcttgcctggtgaagcgagaccatgttgtggccgatgagctggacaatggcattcgactgtatctcaattttggtcatactattggacatgctattgaagcgacagctggttatgggcaagttatgcatggagaagccgtcagtatgggcatggtgcagctctcccgagttgcagaagaaaagggcttgatgccaaagggaatcactcaaaaaatcgaagaaatgtgccggaaatttggccttccggtgacctatgagaactgggataaagaagccctttatcaagccttgacccatgacaaaaaagcgcgtggaactagcttgaaattagtaattgttccagagttagggcaagcagcgattcatcaaatccctcttcaagaaatgaaggactttttagaaagaaaggaataaggtcgtatgagatatttaacagcaggagagtcccatgggcctcgactaacagccatcatcgagggggttccggcaggccttcctttatctgaagaggatattaataaagagctcaaacgtcgacaaggtggctatggtcgtggtgctcggatgaaaatcgagagtgaccgtgttgagatcacatcaggtgtccgtcatggcttgaccatgggaggtccgattactctgaacgtgaccaatctggatcaccaaaaatggctggagatcatgaatgtagcaccggtcgaagagaaaaagaaaaatctgcgtaagatcaccaagccacgtcctggtcatgccgatctagccggagggatgaaataccgttttgacgatcttcgtaattcgctcgaacgttcttctgcccgtgagacgaccatgcgtgtagccgttggtgcggttgctaaacggattttagaagagattggcgttgaagtggccagccacattgttaattttgggggaatcgagattgcaattcccgagaatctaaccgtttcagaaatcaaggaaaaggcagcgaagtcggaagtttcgattgttgtgccagaacaagaagaagccgttaaggcttacattgaccaagtgaaaaaagatggcgataccatcgggggaattgtggaaaccttggttggcggtgtgcctgttggactaggatcctatgtgcaatgggacaagaaattggatgccaaaatcgctcaaggagtggtctctatcaatgcctttaagggagttgagtttggccttggttttgacgcaggtcgcctaaaagggagtcaagtcatggatgaaatcatctggtctcaggacactggctatacccgtcgcaccaataatcttggtggttttgaagggggcatgaccaatggtgagcccattctggttcgtggcgtcatgaaacctatcccgactctctacaaacccttgatgagtgtggatattgaaactcatgagccttataaggcgacggttgagcgcagcgacccaacggctctaccagctgcaggagtggtgatggaagcagtggtcgcaacggtccttgctacagaagtgcttgaaaaattctcatccgataacttggaagaattgaaagaagctgttgctaagcaccgggactttactaagaatttttaagagaaagagttttcctttggagaagaaagttgtttatattgcagggttgggcttgattggtgcttcacttgcgctaggcattaagagggcccacccaaatgtgaccgttcttggttacaatcgtagtgaagcgtctcgaaccatcgcccttgaaagaggaatggttgatcaagtgacggatgatttcgcagcctttgcccctttagcggatattattattttggcgcttccgattaagcaaaccaagtcttacttaggaaccttagctggcctgaatttgaaagaccaggtactggtgactgatgcaggctctaccaaggcagaaattgttgcacaagctgaaaaggtatttacagataaggccgtacgctttgtgggaggacaccccatggctggtagtcataagacaggtgcagcagcggcagatgcaaccttatttgaaaatgcctattatatttttaccccttccagcttgacgacaggaggtgccatggaagagttgaaagagcttctgagtggattgggatcccgctttattgaaatcgatgccgaggaacacgatcgggtgacttcccagatcagccattttcctcatattttagcctcgactctggtcgagcaggccgtagcttatggggaagagcatgaaatgacccgccgttttgcagctggtggctttcgggatatgacacggattgcggaaagtgagccaggcatgtggacctctattctcttgtccaatcctcaagcgatattagagcggattgaagatttcaaagaccgtttggatcaggtggctgagaccattcaagcagataacgaagaggctatttggtcctttttccatgaagggcggaagcaccgaaaagaaatgcagatccatcagcgtgctggacgcgatagtgcctatgatctctttatcgatgtccctgataaggaaggtgtgatcctcgaaatcttacaactcttacaagggatttccttggtcaatattcacattaatgaagagaatcgtgaagatatccacgggattttgcagctgacctttaaaaatgcagaggatcaagagcgggctcaaacattgatcagccaggcgacgtcttatactgcccttgctcgctaggtctacagaaggatttgcgtcaaaatacctgcttcattttaggaatattgaaggaaaagcagtataatagaagtatcttatcagtaaaggagcctagaaaatggcaaatatttatgatctagcaaacgaactctctcggaccctgcgagaccttcctgaatataaggctgtcgtagaaagcaagcaagcgatcgaagcaaatccagaagcgaaaacgctgtttgacgaatatgtcgctttccaaaatcaactgcaaggcttgatgcaatccggtcaacttccaacagaagctgtgcaacaagaaatgaaggactatatggaaaaaatccaagcaagtccgattgtgaatgaatttttcaccaaacaacaacaattgtctatttatcttgcagatcttgaaaagatcatctttgagccgattcaagatttatacaaatagaaatttctaccagagttgtaatttcgactctggtattttcgttcgccagtagaagaaaagaaacgcaaaaaaagcttggaaacattcgttttttgttccaaattttggatcaaaaattgaattcatgccctaattatgatagaatatgtggaaaagcactctggagatggcaatgaaattaagaaccaatagcaaggctctaaagggaaccattcgtgtccctggtgacaaatccatcagtcaccgctccattatttttggaagtcttgcaaaaggcgaaaccaaggtttatgatatcttgcgaggcgaagatgtgctctctacaatccaggtgtttcgtgatttaggagtctccatccaggatgatggggatgtgattcggattcaaggggtaggctttcaaggtcttcaagctccgaccgctccccttgatatgggcaattcaggaacgtctatacgtttgatttcaggtgtcctagcaggtcaggattttgcagtgaccatggttggagatgatagtctttccaaacggcccatggatcgtgtagcgattccactgcgtcaggtgggagtagagattgctggtcagggagagcgcgattgcccgccattacatgaaaaagggacacatcagcttcaacccattcattaccgtttgccagtcgcatcggctcaagtcaagtctgctctcatttttgcagctttacaggctgagggtgaatcaacgattatcgagaaggaaaagacgcgtgaccatacggaggatatgattcgccaatttggtggagagatccaggtggatggaaaaaccatccgcatccaaggtggacaagagttccaaggtcaagaagtcatcgttcctggagatatttccagtgcagccttttggttagtggcaggcctcattctgccagagagtgtgatcaagattgaaaatgttggcatcaaccaaacgcggacagggattctcgatgtgattcaagaaatgaggggagatctcaccatggaggatcgcgatgaaaaagcggtctctgcgagtctcactgtcaagacttcgtccttaaaagggattcgaattgatggggagttgattccacgcttgattgatgaattgccgattattgctttacttgcgacacaagcaaatggtcagactgtgattgcggatgctgaagagcttcgcgtgaaagaaacagaccgtatccaggtcgtagcagatagcctcaatgccatgggagctaatgtcgtgccaagggaagacggcatgatcatcactggaccgacacccctacatggagcagacttagagacctttggtgatcaccggattgggatgatggctgccattgctgccttattggtgagagatggaaatgtggtgttggatcgggcagaggccatcaacaccagttaccctagtttttttgaagatttggagacattactgcatggctaaaattttacttggttttatgggagctgggaaaacgaccgttggtcgcattcttgatccaaagttccatgatatggatgaattaattgttgaagagatcggtatgtcgatcaatgactatttcgcagtggaaggagaagcagcctttcgtcgtcgcgaggctgaaatgctggagcgtttgttggaaaacgaggcagccattatttcccctggaggcgggattgtcgtcaatcctcataaccgtgcccttctggaaaaaaatccgcataatatttacttgcgcgtgaattttgagaccttgtacagccggattcaaaatgacaaagccatgcaacgtcccctctttttaaacaacacaaaagaagaatttaagaagatttttgatggtcgtttgcctttgtatgaggatattgctacccatattgtggatgttgaggacaaaacacctgaagaaattgcggagatcattcgatgcttgtaggctatcttggtcccaagggatcttttacccatgatgtggccactcatagctttccaacttctgaacatatcgcctatcgaacgatcacagatgtcatcaaggcttatgagaatcaagagatcgattttgcagttgtccccgttgaaaactctatcgaaggcagtgtccatgagacacttgattacctctttcatcaagggacgattcaggccgttgcagaagtggtctatcccatcaagcaacagctcttggttgctaaaaaagatcgtctcattcgaacggtctattcgcatccacaggccttggcccaagggaaggcttttctatgggcccattatccagatgtggccatggaaatgacggcttcaacagcctatgcagcgcgctatgtagcagaacatccagacttggaaattgcagcgattgcccctctggcagcagctagtgagtacggcttggaagtccaggccaaagacatccaagaaatcgaggacaattatacacgtttttggattttaggggccaaagagccagcgatctcagaaactttaagtccggcccttcaaaaagttagcttggccttgaccttaccaagtaacctggcaggagccctctataaaggtttgtctacctttgcttggcgtgggatcaatttaaccaagattgaaagtcggccactaaaaacagctttaggagaatactttttcattattgacctcctaaacgaagcgcctgatcttctgcagtttgcctatcaagaattagacagtttgggcattcagacaaaagtcttgggtcagtatcaggtctataccttaaaagaaaatggaatggagaaaagatgagtaaggaatcaaactttctatctcaccatgagcgaaagcgattagagtacttatactcaaattttcattatttgaatgaacgagaacaactagaatacaagtacctgctcaaaaagagtcaaggagcttatgaggaatccagacctactacgcctgaagtagcaagtactgaagaagttcaaggtgaggtttcagagcaaatcggtgaacttcctgtctaccagtcacgtagccaaaagtctaagaaaaaaactgcggtagctggtggtgcggtgaaaagaaagaaaccccgcagaaaaattcgtgtgaagagaatcctcaaatggcttgctctctttttcttgcttattatcggcggcatggtcttcatgtttgtgaaaggcctcaacagtaagccagctggcaaagatgccaaaccggctgtcgttgagaaatttaacggcaagaagtcgcgagatggggtcaatatcctgattttggggacagatggtcggatcggtgagaaatcagatgagacccggacagactccatcatggtggtcaatgtcaataacaaagaaggcaagatcaagatggtcagctttatgcgggatacattggtccatatcgatggtgtcagccagcaaaatattcctgaatatgatggctactacgaccagaagctcaatactgccttcaccatcggggagcaaaataacaaccaaggggctgaattggtgcgtcagatgctcaaagataactttgacattgacatccaatattacgccatggtcgatttcaagacctttgcgacagcgatcgataccctcttcccaaatggggtcgagatgaatgcgcaattttcaacggttgatggcgaaaaggtcagtgaagtagaagtaccagatgatttgaacatgaaagacggtgttgttccgcagcaaaccatcaaggttggaaaacaacggatggatggccggacccttctcaattactcgcgtttccgtaaggacgatgaaggggactttggtcggacccgtcgccaacaagaggtcatgtccgctatcatgcatcagatcaaggatccaactaaactctttacgggatctgaagcccttgggaaagtctttgctatgacgtctaccaatgttcccttctctttcctattgaccaatggacttggactagtcggaagtgctggaaaaggaattgaacgagtgaccatcccagaaaatggggattgggtcgatgcctacgatatgtacggtggccaaggcctgctcgtcgatttcgatgcttataaaaagaaattgtaccaaatgggactgagatgatataataaggggataggagttttggactccaccccttttaatttgtagaaagatagaaaatgatgttaaagaaaaatgaaattgtagacgttgagattgttgatttgacccatgaaggagcaggagtggctaaggtcgatggcctggtcttttttgtggagaatgccctgccaggagaagtgatccgcatgcgcgtgctcaaggtcaataagaagatcggctacggaaaagcagaggagtacttggaaaaatcccctcaccgcaatgaagagctagacctggcttacttgcgaagtggcattgccgacttgggccacctagcttatccggagcagctgaaattcaaggccaaacaggttaaggatagcctttacaagatggcaggaatctctgatatcgaagtgcccctgaccttggggatggaccatcccgtccagtatcgcaacaaggcacaggtccctgtccgtcgtgtcaatagtcaggcggagacaggcttctttcgcaagaactctcatgatttgatgccgattgaagatttctatatccaagatccagtcattgaccaagtggtattggctcttcgagatttgattcgtcggtttgacctcaagccttatgatgaaaaggaacaatcaggcttgattcgcaatctcgtcgttcgtcgtggccaccattctggagaaattatggtcattttggtgacaactcgtcccaaggtgttccgtgtggaccagttgatcgagcagttaatcaagcaattcccagccatcaaatccgttatgcaaaatatcaatgaccagaataccaatgcgatttttggaaaagaatggcgcactctttatggtcaggattacattactgaccaaatgttgggcaatagcttccaaatctctggaccagccttttaccaagtcaataccgaaatggcagagaagctttatcagacagccattgactttgcgggcttgagagcagaggatatcgtgattgatgcctactccggaattgggaccattggcttgtcagttgccaagcatgtcaaggaagtttatggagttgaggtcatcccagaagcagtggagaatagccagaagaatgctagcttaaacggcatcagcaatgcccactatgtctgcgatacagcagaaaatgctatgaagaattggctcaagaaaggcatccaaccaactgctatcctagtcgacccaccacgcaagggcttgaccgaaagctttatcaaagcaagtgcccaaacaggcgctgaccggattgcttatatctcctgtaacgtcgccaccatggcgcgtgatatcaaactctatcaagagttgggctatgagttgaagaaagtccagccggttgacctttttccgcagacgcaccacgtcgagtgtgtaagtttgttagtgaaacgtagctaatcctcaaaaggttcagtgaaccttttgagtcccacagacgcaccatgtcgagtgtgttagcttgttagtgaaacgcagttaatcctcaaaaaggttccccgaaccttttgagtcccacaaacgcaccatgttgaggcagtatcactgcttgtacgagctgaggcattagcgaagtagaagtagatgatctgcccatgtaataggactcgtagaatgaggagggaaaccgacgaaatgatacggtaagtccgaaccgctgagtgtgtaatcttgttagtgaaacgcagctaatcctcaaaagatttccccaaaccttttgagtcccacagacgcaccatgttgaggcagtttcattgcttatacgagctgaggcatcggcggagtagaagtagatgatctgccaaggcgacaagatgaaaccgaaggtcgataaggtgccctcgggtatatgactcgcagaatgaggaaggaaaccgacgaaatgatacggtaagtccgaaccgctgagtgcgtagtgttgctataacgagtaaaagggtgaaaattcttgatttcaagctattgtacaagtattttgtctttgtagataaaggcaattttgacatcaaaaaagtcctaaaatggtacatagaagtaaatgtatatgtggatatcgttcacatatcggataaatgaatacaacaataaatatttatatcttaagcgagaactattctatatggttctcgatttttttttgcgtttaaggagaaattttgtagaaaaaatacagtcgtcacgtcatatcgtgatttcttatctagtccgacaaattgtcctggatattgttgaagcaacagctgtgatggatgatttggaaaagagtggcttgattcaaatccaaccaagtggtgaactggagataaaagagtggggaggtatctcatgaaatggattacagcaaatcaatatcaaacgtctgagcgctattacaagattccaaagattctctttgaggatgaacgggggatatgaaaatgaaagtaaaggtgatttatgcggttcttaaagaccgccaagagctgtctcttagtcttagttgggaggacaatccccattataccaattggcttaatgatttctttggaaatacgggtagtccagttattctcgcccagttctttctaaccttctggtagggtaattcaggagataagttactcgaacgccagacaagagatatagagtggtattactatattgaaaagggcttttgtcagccaaacagaggtacggctcaaagtgattctaaggcttttgaaagtgtacgaggggaactttatgataactcgattccaggaggtagcgatggtattgttatgctatggccagtgtacctggagagtagcagctcgcatcaaccagttaggattaaaattcaagggcagaaatggggaaaagattcctaatatcaacaccatgggaaatgctcaagacatggtggcaaccgctgcaattctggatggtgacataggctctattccaagggctggagctatgatctcctttgtcgatagccagttatggaacctttgttttatatggtcatgtgtctttcgtctagaaggtctatccagatgattcatttctgctatcagaaactaattttgatggaagacggttttctcaggcagatagtgccatgagttttgcttatacgacgaaacagagagtctttacttgaaattttctaatattttggtgacttatagtttttgtaagtcactttttattatcaaaaaacttgcattttatcatttaaattgataaaatacgtaaaaaatgataaaaaggaaaaacaatgaatgttcaaaagataatttctatttttcaatcgttttatattaatgtaagtgttgaaaaaatagctttaactttaccaattagttttgaaaaaagatttcaatatgtccaaatgaagtttcataaggagtcatttttattgattaaagaaaagagaagaggaagtttagactcatttgtcactcaagctcgtattatgggtgaaaaagctagcatggacgttattttggtattttcaaagctatctgacattgaaaaaaaacaactccttcaagctagagttccttttgtagatttcaagggaaatctcttttttcctccattgggattagtattgaatgctaatgatgatgttgcaacatctaaagaattaacacctagcgaacaattaacttggattgcctttttattgacaaaaggtcaaaaagtagtagatgttgatatgctttcacaggtaactggacttccaaactcaacgatttatagatgtttgaggacttttaaaactttagattggttaaataagccaaaaaaactttacacctatactgcatcaaagaaagaattattcttaaaatcagagccctatttatttaatcccatcaaaaaacggctcttattgccagatgtagatctgaagaatataaaatctgcttctaggcttctatacggtggtacgtatgctttatcctatttgacctttttagctgaatcggatgaaaatagtagctatgtcatatcacatagacaattcaataaattatccttgccattttctcagcatgttttagaaggtaaggtattagagatatggcgatatagtccttttgtatgtgaattttggaacgattttaaagaaaatcaagatagacagtttgtagatcctatttctctttatttgaccttaaaagatgatgatgatccacgtgtggaggaagagattgaagtacttaaaaataatatattacagtatctaggagaagatgatgccagctaatacgaaagctatttttcaagaaatgtttgcgaattttcaagactattatgttttgattggagggactgcaacctctattgtattggactcgcaagggtttaaaagtcggacaacaaaagattatgatatggtcatcatagatgaattaaaaaataaggaattttatgataccttgaatcactttttagaattgggagaatatcaaggaagtcagaaggatgaaaaagcgcaattatttcgatttacaacaaataaacctgagtttccttctatgattgaactatttagtattttaccagaatacccattaaagaaggaggggagagaaacacccttacattttgatgaagatgctagtttgtcggccttattattggataaggattattataatatattggtgcatgaaaaagaatccattcagggatactcggtgttgagtaatcgtggtttaattattttcaaggctaaagcttggttggatatgagagaacgctccgccactggtactcaaggtttaagtaaagccattaaaaaacatttgaacgacattactcgattaacagctctattagtagggagtgaaaagctatcaaatataacctctagtgacacggtgaaagcagatatgcaccgttttgtgatagaacttgagtctgtgatatcaactattcctcaaaatgatgatattttattgaatagggatgaagtttttgaaattttgaaagattttttagatagttaaaataattgtagaaacaatagtaaagagatataacaagtatacaagttagcaagtaaattgattgtatgacaaataagaattcataggaggtaacgatgaacaagattacttgtatttgtttaggtgtgaaagatatggaaaggtcaataaagttttatagagatggtttaggatataagactgattgcagagaaaataatccgtcagtatgcttttttgatactccgggaacaaagtttgaactatttcctttggaacaattagcaaaagatattgatgaaaataatccaccaaaagggaatggattttcaggaattacattagcctacaatgttgaacataaagaagatgtagagactgtaattgcattagtaagaaaagcaggtggaaaaattgtaaaagagccacaggaagttttttggggtggatatcacgcatatttttcggatttagatggatactattgggaagtttcatggggaccaaattttcaatttgatgaaaatggattgctgaaattttgaggataaatagggaaagagtatgtcataaagtaaggaatatttgattttgaaggaggtaatcatagtgaatgaatttaatgaatttgttcgtgagattttttccgcagcaggtgatattatcataagatccatgatgggcggataccttatatattttaacggtaagctgataggtgacatttgcgataatgaactatttttaaagagaacgccgacatcggacaaacttcttgcagactcagaattgcgttatccgtatgagggttcaaagacattgatgtatgcattcgacagatttgaggatatggatttgattactgaactactgaaaggtatgtatgcggaactgccagaaaagaaacccaagaaagctaaatgagacaaacaagcttcaatttgttgaatttagcaaggtacaagtttttatgagatgaaacctataaaacttgtacagatattgtagggtaggaaaagaagtcttcctctatactaaaataaaccgaaagaaaggagggattgaaatgaatattatcaagtcatttaacaatacgattgattatcttgaaacagttcttgatgatgaaattgacgaaaagaaagtaactcagttatccggatattcgtattcaatgttcagtcgcttgttttctattctgactgaaacaacgctttcagaatatttaagaagcagaagattgacggaagcagccgttatattaagaaatacggatgaaaaaattattgatgttgctttcaaatttggatatgagtcatcagattcatttggaacagcttttaaaaattttcatggatttactccttctgaggtaagaaatggaagaccattcaaattagtatcacgagtgcagttagcactaagtgtaagaggaggaagaagcatgaacattacaattcaaaagaaacaagcctttacagttgcaggggtaaatgaacaaagcatcaattcatcattatgtccgagtgtatggaataagctatataaaaaatatagccacgatgaacttgcaagtttgggaagcgatcaaagtatgggcgtttgccatgatgtggaaaattcaagcacaataaattatatggctggttatatcgttaatgatgtagataaagccacaagtatgggcttagatgttttggaagtggaagaagcagagtatgcagttgtagaattagtaggaagtgttccggagtgcattcataacgggtggaaatatgcaatggaagtattcttccctgagcatggctatattcattcagaaaaacctgactttgaatattactatgaaggtgatatgcacagcaaagactacaaaatggaactttggattccgataactaaagcttaaaaaccagcttgtcgagctggaaaattccagtttgccgaggtaataccatttaacgataaccttatgttatcattaaaaagtttatagaacagacaagactacctggcataattagtgttcactcgttccatgttgatgcggtatcactgcttgtaggagctgaggcttcagcgaattagaagtagatattctgcccatgggataggactcgtagaatgagggggaaaccgacgaaatgattcggtaagtctgaaccgctgagtgtgtgactctactcttccgatctgagacagcgaaaagtagaaggggatggtattggtatcaatcaatgagtaacaaactaatagcatgattcgaaacatttgcttgtaatttgcggaggaacatcaatatggatggaataacaaaagattctataaaaaaggctgaactaatgaaacaattatggccccaattgacagataaagaagctattgatgaagtaaaaaaatatacgaatggcaaaaatactgcaatctttacagaagttaaaggtgatacaattgtagggttagcactatgttcactcagatttgattatgttgaaggttgtaaatatagtcctgttggattcttagaaggaattattgtcgacgaggaatatcgtttacaggatattgctaaacatctctgtgcaaaatgtgaggaatgggcgaaaaataaaggatgtaaggaatttgcaagtgactgtactttaacgaatacggattctataagatttcatctcaatattggattccaggaggcaaatagaattattcattttaagaaaaaattataatttcagaacgtggtcaaaatttatatatctttaggaagtgtaaaagaatggacggactacgaattacttttcattagttaagaatatagtaatgttgtaaagttaatcgaggagttattgatggattttagtggtaagatagccataaataaagggtggtcagatgataaaaaatattgtgtgacagatcaaaaacagcaaaaatatttcttgcgtgtttctgataaggagaagttagattctaaaaaatttgaatttgatatgatggagaaagtagcttctcttggagttccgatgtgtaaaccgattagcatagaactctgcgatgacgaagtacattctttacatgaatggatagatgggaaagatgctcgagaaaccattttaactgtttcgaaagaacaacaatatacttatggagtagaagcaggaagaatccttcaaaaaattcattcactctctgttacagaagtttgtgaagattgggaggtcttttataatcgaaaaattgatgacaaaatctccaaatacaaagaatgtcccgttcagtacgaaaatggtcagatttttattgattatttaaatgcaaatcgagaattgttaaaagatagacctcaggttttccaacatggagattatcacatcgggaatttcatgattggtgaagatcgtaaaatttatgtcattgactttgatcgatttgatctgggagatccttgggaggaattcaatcgtattgtatggtctgctcaagtctctccctcttttgcgtctggtatgatagatggatattttgatcataaggttccggatttattttggaagcttctcgctatctatattctaaataacatagttggtgctttgccatgggctgttccttatggaattgacgaaatatcagtaatgcaacaacaagctaaggaaattttggaatggtataatgatatgaagcaaatcattcctagttggtatttgattgagaaaaagctgaataataaaagagtttaaatatcaatttgaaaaaatgtcaagattatttgctcatattataacgaattcaattctttattaatacctatcgagaattatcttgaaacttggaatgttgttttggggtcaagttacatgaaagaatatattttaaatttagaaaaagaattctctttaatagaaaatggatttaaagaagaagagaaaagagctcttgctgattatctatcaaacgataatgtgtataccaaagaattagcatttttagcttttaaatccaatgtatatcaagttagaatgtacagtgtatttctctttggccatttgtcatcgtatgaagaaattttgatctttatgagggatgaggtttcaaaggatgacaattggagagttcaagaagtattagcaaaagcatttgatgaattttgtaagcaaacaggttatgaaaaatctcttccggttattgacgactggctacaaaataataatccaaatgtcagaagagctgttacagaaggtttgagaatatggacgagtagaccatatttcaaggataatccagatgaagctattaaacgaatcgcaacattaaaagaagattctagtgaatatgttagaaaatcagtcggtaatgctttgagggatattggcaaaaaatttccagagttgatcaaagaagaacttgatagttgggatgttaagagtaaagagattcaaaaagtttacaagttagcaagtaaatttattaagtgacaattatcagctataaagcttgaaaaatgctaactataaaatagtttcattctaaagtttaattttaaacaacaacttagtcattttcgttctataatatagaagtttactagcaccatacgtagagtgtgtgagtttgttagtgaaacgtagctaatcctcaaaaggttcactgaaccttttgagtccgcacatgcgagaaggtgccctggggtatagctgtcgtagagtaaggagtgtacgacgaaacggtaggtaaaagcgtaaaaaccttgtaatgaaagggattgtaaaaagccttgaggtcaaggcttttctcgtgtacataggaaatattagagaaagagtataagtttagtatcttggtttgatagatggaattgttaggattcaatttccatttacccttttatttttctatgttataatattttagagtagacataatcagcttttaactcttctcttagattgataaattcgctcaatcatataataacaaagccagactagtcactttattctataataaagatgctttcctgcaccacgttgcatctgtagttctgctggtaaagcataaaaatctttgaatgaaatatttttaaagtgtttgtatcccagcaaagagttaaagagcgactatctaagttggtaaataacttcaggaggtttatacgttatgcttagatcttatgtaaccaagaagcacttattcttctattttatagcgattatgattacttggctggaggctattattacaccagctttgattcagtatattgtctccagttttaccaatcaccagttgcatttgctatggcaggtcttgttttgggggattgttggaaatctgattctcttgctgggtttggcggggaaacgttattactacgcacgagtgctgacagacttcaagtcgggtattaagaaggggatctttcagactttcttatatagccgtcggatagcggatgaagaagttttgtcagacttggaaaatgatgtaaaacagctagaagataattatattgagccgactgttattatcatttcttctttgggatttacaaccgtctctatctgttacgctctttggactaacttttatcttggcttgctctttatcattttttattcgatacctgtactttgtagtggaattggctctaaacgtttggatgaaattacgaaggagaagtccttagctaatcaagcctatgtctctcaagcaaccaatatgatcgcaggtgctcgttccatacggtattatcggggacaaagtttgttttacaaactgttctccaaagatttgcacaaggctctaaaggaagaaatcgcctatgaaaagcaacggaccataaatagtctctttatcaatggaattgatgctttttgctctgttgcgcctattgtcattggtggtttcatgacctattataactacctatctgcagccagctttgtaggaatttacctcgtatcgtataatattggctatcaatttcaggagttatcttactttatcaatactagaaaatcagccaagtctctctgttataaatatcaaaaattgctgggggtagacttggatatgccttctgttctcgaaggttctgtctttcctatccagttagagaaagtcagtgtagagcgtgatggtcaagaaatcctagcctcgtgtgaccttactattgaggaaggtgaaaagattgccattatcggagaaagtgggtctggaaaaacaaccttactgaacctaatctatggtgaaattgagcctagtcatggtcggattcgctaccatgggcaagagctaacctcggatgaactctatcaggcaggagcttacattctccaatctagtcatatctttgatggtttaagcctagaggaaaatattgctttgggacaagaacttgatattgtaaggatggacgaaatcctgcaacaaactggtttgaaagatcttcaaaacaaaaaccttagcaaccagactctgtcaggcggtgagaagcagcgcttggaaattgcccgtgctctctatcacaatcgccaatttatcctagctgatgaggtcaaagccaatctggactttaaaaatcaagagaaaatcagtcaccttctcttctccctccctcaagcactcgtagaagtgattcatcactatagtgaagaggacttgaagcgctatgataaggtgataaaattggagaaataggtggaggtatagatttcagtaaggagtttaaatatgaaattccatgaatttggtgatagggatttgcctcctatcttgctgatacatggcggtggcagttcttggtggaattatcttcgtcaagcgcggatcttgtcagaagactaccgtgttattctacccactttgaatggccacggtgaagaatatccactcgattatgtttctacggaagattctgctttggagatcctagactatgtcaaagcaaactgtgctgggaagttgtttgcaatcggtggcgtttcacttggtggtcaaattgctatggaacttttgtcattagacagcgagatagctgagaaggccatcatagatggaagcctctgtattccacaaccaaggttagctaaaatcagcatctttctagtagctctatttggtaaacagatgttcagtaaattttcttgcaaacttcaattaagcatgatggacaaactctatcctaacctggcttattcagaggaaataaaagcatattatttggaggatctgccaaggacgcctatcaaaacattggtgaccatttacaaaacatatatggggcgttacaagctcaaggacacaatttctgctagcaaggcgcaggttctgtatatctacggtgaaaaagaattgaactgtgtgaaagcatcagcgaaattatttcagcagctacatcccaacacgatcctgtatgaagcaaagggctataaccatggctatttatcagcttacctgcctcaagaatggattgatttggttgagccatttttaaagagtggttcattggaaatctgatatgctgtaaggaggaatcttatgctaggagcaatagtaggagacattgtaggttctgtttacgaatggggcaatattaaaacgaaagactttccattatttcgtgaggattgttttttcactgatgacactgttatgacctgtgctgttgctgaagccatcatgaacggtggtcagaaggatgactttattgatgccatgaagaaatatggcaggatgtatcccgatgctgggtacgggcctaggtttaatacatggattcaaagcaatgattgttccccttataatagctttggcaatggctctgctatgcgtgtttctccttgtgcttgggtgatggattgtggtttctgtgcaagaacaggtacttggccatctagtagaaatcttgcgagaatttctgcagaggtgactcataaccatccagagggtgtcaaaggagctatggcgacgtctgatgctatctttctgtgtcgttattactttggaggctacagtggtgactatggaaaaccgatcaacgataaccctacagagtgcaagagactcatcaaggaatacatagagcaagagtatggatataatctttctcaatcactcgatgacattcgtcctaactatcattttaatgaaacttgtcatgatacagtaccccaagccatcattgcttttcttgaaagtacagattttgaagatgcgattagaaatgccatctctcttggtggggacagtgatactcttgctgccatcaccgggagtatagcagaggccgcatatggtattcctgattggattaaggataaagcctatacctatttagatgagcctttaaaggatgtgcttagccgatgggagcaagaagtttcaataacataacagagattagataaagacaatcaaaaacactaaagcgacgagataagtaacaatctcgtcgctttttgcttaaaagttaatgttgctatggatttattcaggcacctagttagatttttgctgattcaagaggaggatacaagtcattactgagatacaggatacaagaatcagataccaaagattttcaagaccaaaaccatgatctagcatcaagcggtatccccaagaagcggggaaaagacgcccaattgcttgaagaaaatcaggtagtaagttgctaggaaacatgattcctgagagcataattgagggtaaaaagacaagttgcgctatcatggtcagctttgcttgattttttacagtaaggcccagtatacttccgatactcaacgatacgaaaatgtagatggccagtgcgagaaagaataggggaagttgactcggtagacttgctttaaataaaattggagcaagtagtaggatcactatgcaggtcattatcaaatgaacaaaggcagagagaaccatggtcaccaatcctaagtgaataggcacaccatttgctttataaatcttttttatgtcgcttccgtatgtttcaatcaaggaaggcggtaagccgagaagggcccccatggaaacactcataacaatcattgactgtatgagtgtactacccatttcaggcataacggaagtaaaaataccacccatgagaagaaagaaaataagcggtacaatatagtaagtaaccaagagagacttacttcgtatgtccaatttccactgtaatgctaggctatataagaatccattcatttcgatcccctccttgccatttcgatgaaatgctgctccagtgtgccacgatcaaccttaatatccaatacctggatatttttctgtttgcattcttccaataatgaaatcaaagtgtcctcgatcgtatctgtttcaaaagattcctctccgtcccgggtctttaaatggatgaaatattttcttcccaacctgtctgttagttctgaaggagtaccacaaaagacaatctttccactattcaaaatagcaatgcggtcacataagttttcaacttcggccatatcgtggcttgccaaaacaattgtcttaccctgtgatttgagctttcggatttgttcatggagggatagtcttccttcaacatcaagtcccgctgtcggttcatcgagaaaaataatatccggattactgataagtgcaagagcaagatgtaatcttcttttttgaccggtggataattctatgtattgcgactccttcatttcttttatgccaagggcctttagcatagcatcatcaatgtatgtatgattccattttgcaaagagctttatggcttccattggtttgatgtgggcgggtagagaggaggactgtagttgaattccggttttcccgtttacaacgatagtgccttcgtcatattttctcagaccttcgatacattcaagcgtggttgttttaccagctccgttcactccgagcaaagcaaagatttctccttgtttgatttgaaaatcgagacctctaagaaccatattgctaccataacttttctttaatccagaaacctctattgcgtctttcatggttctacctcctcaaggggattggttccaagccttgaaaaatagacttgtaaagcgggccctaaataatcattaacgattttttgcttttcttcccaagcgtttgaggcggtatcgatattccctatctccatcaacttcggaagcatgctcatatcaccatttgtaaactccataatcaagctccagtattcttgcacaacctgttggctttgttcgctttcaactggcacgttttctttttgaagctccacgatttgatcacttaggtggttcaacctgtccataaagtcttgtccgcttttcttgtcaaatcgactgcgtatctggtcgagcgtatcatcatcaaaccgcttaatcagagagtaagagtcattcttcatctgtagattgacaataatgtctgcatatttcttaaaattgaccgtttgtatttgtataacttctacctttaactgctctattgcgatcaaagaatccttaagttgctctatatttttacgaagaacatctgcctgctccgtaagagctttagcaacatcatcaggtgtttttaaagagatcaaacggctctttatatccttgagagaaaagcccagtgattttaaagatagaatctgatggagtagcactatatctttatcggtataaagcctgcgacctccctcactttctgccgatggggaaagcagcccctctttatcgtagtattgtagagtacggatggtaactcccattttcttagcaagttccccaactgtcataaatccttccggaattgctctatatttagccatcattactcccctcctcatacctattatacatcgttacgtaacgtcatgaacaagattattttaaaaaaatttgattgaaaaagaccttttcattttcgagaaaagaaagagaggtcatagataaaatgaagcatgtgacaaaatattgacataattcctaccctttagaatattatggatgagtatgtgtcatgatttagaaaagcaaagcacaattacaagatgatcaatagcaaacacaaggtgatagacagaacaatctatcacctttttctgtttaaaactatttgtcgctagtcataaactcagctctcttatctatctcaccttatatgcggtgaaagaagaatctatttttcacttgaatcccttctctttcgtatggtagaatgtatatacaaattgtatgtacaaaggagaggtagaaatggcaaacacgaaagcagtgaattttcgcgcagatgcgatattttaccagaaaacaaaagaagtacttgcagatgaaaaaatttctgtgtcagatgtcctgaatgcagcgcttcgaaaaattgccaacgggactgtggatccaagagaatttgtttcaagtgatttgcagaacacgcagtatcaagtggcctttgaggatttgaagaaggagattttagttgggcaccaggaaattgctcaagggaaagtcacttctgtagccgatgtgagaaaggaatttggtcttgactaagttgaaacgctatcaggtctttcttgcagatcgagctaagcaggacttgcgtgatattcacgactatattcttgtgaatttttatagccagcaagctgcagatggtaaagtcgatttgcttttaagtgctcttgagaccctagaactttttccagaagcgtgtcctctggtatcaagccgagggtatggtgagatgacgaatgatggaaaaccctatcgttatatgccaatagagaactatctcgcattttattatatggagaagcatacagtgtatgttgctcgtatcctaagtgcaaagcaggattgggtcaagattttttataagtaggatgaggaactttgtgttgcacttcattttacaacgtggctcttataaaaaaataagactgaaaccaaggtgaaaactatatggttcagtcttttatcctatttatgtagtataatgaaggaagtaggggttctcctttttaatagattttttccaagctgatattagtcattctattgagttaaaatctagattagagataagaaagttaagtgaattcgagagattgtttcttattttattttagagaattatcttatcaggaaaccatttccctacacttggatgacagggctttttttaggtgtgggatctctctatctgtctatactttgggtgatcctttattttagtgcttttgtcatcgaagaggcccaaaggaatatctggctatggattgttatcggtatagttgttatggcatctatagtagcaactccaataagaagatactactttgatttataagtcatttttaattttaagttagtttctgatggaaattatgtagaaagaggaaaagcatgaagcaatcacttgaatttttaaaagatagaatcactgataagatgcctttagaggatatggtagaaatctttgaagatttgtgtagcgttcctattgaggatgagatgattttatttgagacaggggcatattcagctatatctaataaacccttgtttcaactatcgttagtaaggcaagctccaaatgaagatgaagagttttatcaagttcaccttgatattttctatgaagctagtgaagataatcaaatcttcagtgaagccacctgggacgaagatatcgaggaaaatatttttgattatattagagcctcagatgtatttgcttatgctaaaaagcaagaatacctagcagtcaatatttatctggatgaaacttaagaagagtagtaaaggaaggaaatctggtgggaaaaatgaacattcttgatcttaattctaatcagaaggagacgatattattaatccatccaatgttatcttctgcacaagggatgaaatcgctgattgcagatcagatgggacaagagtttagatatatcattccggatttatctgcacatgggcaatcagcttcgaccatttacgaatcggctcttaaggaaagccaaatgatttatgaatatttaaaggatcatcatattaaagacttgcgtttagcgttcggtgcttccttgggtggagttgtgttactgcaattattgaatcataaggatatcaagtttgggaaacttgtttttgaaggggttagtttatggacaaatgcgcctttgctagatgtatttactaggtatttattgttaataaagcatagaaaagccttgagaaatagagatatagctgttcataagatggtttcactttatggagaaaaaggagagatgatggcggattctttcattgctatggatgaagaaagcatcaaacatatttcccatgattgtgcatttgtggctttgcccaaccttacgctagaggaacaaaaaagctgtgttttcttttatggttcaaaagaattcgacttgcttgctgctaaaaaagttgtccccaaaaagtatcctcatgccatattccacatttggcaaggatatgatcactgtcgcaagatcactgaaaattcggaagtttactctaagatcctacgagatgaaatgttaagttcgaactgttgattaggtaagcttgttactgaaacagtaatagagtgaaatagcgatagattaaataatgactaaactaaggaatttgcaagttatttcattttaaaagttaattgttggactttttctcagaataggctcaaaattttgtacggttaatggtggatttttcccattataatctctccacagttttatttcgtatatgaattgcaatcggtgtgataagtaggtatagtaaggtcaaaatgataaaaaatccgatatcggcatccaaaaatacataaacgatgttaaagccaaaatgcatgaaaatagaataaatcagattattatatttttccaaaataatattcatacaaatagtaatagatgtaatcacaactatattagcaataatataaggaacggcccgccagtccgtaaattttgaatctacaacccacagaagtgtatgccagaaacaccagactaggccttggtaaatagaggattttaaaaaatgatattttttattaaattcttctctcatataaccacgccaccctaattcttcaccagtcggacctgatgtaaatgataagaatatacttagtggcaatgatacggttcctagattaatgtaggagaacattgttttttgggtcataagtgagtagaggaagagtgataaaatactgagcccaaatgtaagaccaaatgaagatagaagtgggagtaacgacactttagcagagaaacaccgcttaaggaaagttgttcttttttcatcagtcctgaaatacttccatccaaataaaagaaggtatgatggagaccatgcgacgatatttcgtacaatccacatgataacaggtggaaccttaaatattaaacttgcaggagctgctacaaaaataatgagtgcccaaacaagtacataagaactgaactgcaccccaaaagttagacagaaaaaaatctaacttttggggtgcagttcaatttttttttttttaaaattgagaaaatatttttagaaaacgatgtcaaatatagttgacattaaacaactaatattgtaaaataaatgtatcaaatatatttgacacatttgtgattaggaggtgccaagtgaaccgggtgaaagaatacagagtcaatcttggtctttctcaattggctttggcaaaaagtattggagtttccaggcaaacgattaatatgattgagaatgggaagtataacccttctttagatctctgtatcaatctggcaaaagagcttgggacggatttgaattctttattttggaggatcgatgatgatgaataaaaactggcaattgaaatgtgttaaagccttctacgatattacagatgagcttgacgaatacaaggaaaaagaattgagtacctttgggaacaacatgtacatgctctttatgtcggggattatccttggattcctgctcagtttcatgttcactacagattgtgtcggtgtgatcacgtttttagtattttgctactctctgtaccaacaagagcaggtgattcatcgtttggaactcgatatctatgaggtttcagaagatgaagtaggagaggcgaagaaaaaaatgctaaaaagaactttccttcaaactttgattgtgatgggactggctatttttgttgctatcggtttttggagaacaggattgctacaagaaagtaagataagctttgaaatgtatttcacttttattttccctcatgtcattgggctgattaccattatcagtttcttgagtagtttcattgcaaatagaagaaaaatcaaggtgattcgggagtagatccatcagagataagactggatatttatattaagattaactaaaagtaaatggaacccattatgatgaaagaaatgagtaagtatgaatagaatagtagacgatcagatagtacttattccctattataggaatgatgagatctcccttctttggtatcaagatagtgaggtttgcaaacaagtggataatactgatcagatttacgatgtaacaaaacttcataaaatgtatgattacctatcttcacatggttcttgctattatatccaatatgagggagtgttagttggagatgtgacacttcaagataattcagagctttctatagtgatcagcaaagagtatcagaatttacatatcggaagacgatgtgtttctgaaatgatacagttggccaaagagaaagaaatggttaaggttactgctcaaatttatccttttaatactcaaagtcaaagaatgtttttggctttgggatttcagaaagtagatgaagagtggtatgaatataagttgatttagaatagttgtgtatcattttatgtattaaaataatagtcaatatgttatacactaaaaaatattaaagtaaaaataaacttattgaaaaatctaattgacataggagaagaaattgcctatcttctgtgtttgtaaccgcttttttctgctataatatcactagatggaaatgtgggagtttcaatcatggttacaaaacggtttttgaaaaatgttattgttacgctggtctcggtttttatgtccttggtcattgttcaaggggctaaagcccagcaaacgggcctcgattaccagagtcttcatctactgccttttaatggcagtaagcagctcgttctaggtgagtttgatcatttaggtcgggcgacttcggcacatattcagctgcaggacaaggatgagccaaagaaaaaaagagaaccacggctcaactataatccggttggctggcacaattataagattgcttatggaaacaaagggaagaaggcctggctgttccatagagggcatctgattggttatcaatttagtggactgaccaatgaagggaaaaatctggttcctttaactgcctggaccaatacggggaattataaagggacagcagatagcaatgtggaaggcatgctctactacgagaaacggcttgatagctggctggccacccaccccaattattggctggattataaggtgacgcctgtctatacgggggatgaattgattcctcggcaggtgaccttgcaatatgtaggaattgatcgagatggcaaccttctgcctatccatctaagtagtcccaaagagtcggtagatgcttatgggatcaccactgttaccttggataactactctaagaatgcgactattgactatctgaaggggacagccaagccatctttagtgccgacggaaccaagtagtcaaccacaaccagccagtccttctgtagagacgaaaccaagtcaagcccctcaaccgagtcagccagcagtgcctgcacagccatttcaacctgtccagcctacagagccaactcatcaactagctccagttgtttatgtggccagaaatgggagtgctgaggtttattggtattctttggacagtatgcctcgtaataccaatttttctaaggtggttcagatgtcagaagagcaagcgctcagtcttggaaagcgacatacaagtaaggaatgaggattagtcatttagatgatgagaaagcccaatcgcagggctttttgtgtaggggaagttctaaataggagaactaaaatgattgaaaatatgctataataataggacggaggtagaatatgaccttagatgtagataaagaaaaaatgatgattatgggtgtgatttttgacaacaaaaaggtttttaagagcgtctggtttgctctgagcaccaatatgattgaaggatggcatcccacggtagaagacgtggagcgactgagagaagtggccattctggaaagtgcaaactagaatgatctgtttttgaactatatttgtaggtttaattttctgtttgtatgaataattgtgtaagtaaattttaaaaaatacgaataacacttgaattatctagtaaaaactgtataatgtaattaataggaccgcccacctctctttgatgtgacaaggcggacatttttttatctggaagtttttatggatgttaaagaatttaagacttggaaagagcaagtagctaaactaattgagcacggttgtatagatatcaaatcggatgagtttgcgattgatattttgaagaaggttaattattataggctaactgcttattttttaccttttcgtgataaggaaactcagaaatatgattctaataaggtttctttagaaaagatttatgaaatttactgttttgatgcagagttacgcttgcttatttttaagtacattgaagatattgaattatactttagaacccaagtcgcctactatcatgggaaactatacggagctttagcctataaagataaaacttcttttaataaatttcataaacatgatgaatttttggaaggtattgacaaagaattagggcataggaagaaaagtcctatttataaacatcatcagataaaatatgatggagtattccctatttgggttttagtagagtttttcacctttggtatgacatcaaaattttttgccgattctcctacagatgttcaacagtctattgctaacaatgttggtctaaaatcttctcaaatcagaacctatctagaagtttctgtagtcttaagaaattactgtgctcattataatcgactatactatacaagctttacaaaaatccctggtcaacttccttcttttatgcatgaaaatagcaagttaaaaaatagattaatggcccaactttatgctattaaatgcctttatcctgataagaaaaaatggaatgatggatttttacgtgaattatcagaacttattcaacgctatcgagaagcgattcatctccatcatattggctttattgataattggaaagaagtactaaagaaataaaaatattgaaataactatttaagaataattccacaaagatctttaagcccaatcgctgggctttttgtgttgcactagaatcttaacaagttagtagtctaaaattatctcacaagatcttgcaaacctttttctaaagttgtatactagagtgagttttgtgtaatcgtttgcataaactgatgaatgatgagaagagagtatagtaggagacgagaaagatggaattaacagcgatttaccaccggcctgaatcggagtacgcctatctttataaggacggccagctccatattcgcatccggaccaagaaagaagatatcaaacggattgtcttgcactatggggatccttttatttttatagaggatctatacgaggcgaccaaggaaatggacaaggtgacgaccgatgacctctttgattattggcaagtgtcggtatctgtccgccatgcccggatccagtacctctttgaattagaggatacagcgggagagaagatcttgtacggagatcgaggtgtggcagcctataacaaggagaacctggacttcgtcatgaacggctttaagcttccttttatccatgagattgatgggtgtgctgttccggactgggtggctcagacagtttggtatcagatttttcctgagcgttttgccaatgggaatccagccatttcgccagaaggtattcgtccttgggatgcgtctattgccccgcaaatcttggatttctttggtggagatttgcagggaatcattgatcacttggactatttgcaggatctaggaatcacagggctctacctttgcccgatttttgaatcaccaagcaaccacaaatacgacaccattgattactttgaaattgatcgacattttggtgataaagagaccttccgcaaactagtgaaagaggctcacgcgcgtgggatgaagatcatgctggatgccgtcttcaaccatattggctatgattcaccccaatggcaggatgtggtcaaacacggggaggattcgatttacaaggattggttccatattaaaaagttccctgtctcctcagaaaatctatggaatagtcgcgacttgtcttaccatgcttttgcctttgcgggctatatgcccaagctcaatacagctaatccagaggtgaaggcctatcttttgaaggttgcgacatactggattgaagagtttgatatcgatgcttggcgactggatgtggccaatgaaatcgatcatcaattctggcgggatttccgtaaggcggtcttggccaagaagacagacctctatattctcggggaaatctggcattcgtcccaaccatggctcaatggtgatgagtttcatgcggtgatgaattatcccctttctgaaagtatcaaggattatttcctgcggagccataaggagacccagcgcttcatttgggagatcaatagccagtccatgtactacaggcaacagatctctgaggtgatgttcaacctcttggactcgcatgatacagagcgaatcttgacgacggccaaaggcgatcttcagtctgtcaagtctgctcttgccttcctctatctgcaacgcggaacgccttgtatctattatggaacggagctagccctcatcggtggtccagacccagattgccgccgtgtcatgccatggaagcgcgtgtcagcggataatgacatgctaaactttatgaaggacttgatccagctacgaaaagaagtggcgggcatgattcaacatggtaaagtgagtctgaaagaagtagagccagatgtagtagcagtagaatggcagcatgaaggtcacattctcaaagcctactttaaccactcgaagacagactttgtcttagaaagcggacaggcagatctgatcagtcatgggagcatttccgatgatctattgatcattcaaccaaatggctttgttatttatagggaagattaggaatgaggtagactggaatcgaaagattgcagtctttcttttttattaatagtttctttattcgtgcccttatattataatgggagatgagaaagggggagacagtgatgaagatgttaacaatcaatcctatttcggttaaaaaaagaatgacagaatttctgtttgattatcttttcattctagcttatttagtttttctatttttaggttcgatgcttatttacatcatcttttttaatggcgtcccagagtttacagaaattcagtcgcagtggcttgtattttttacctctgttttgccaatcacgcttcttttcacattcttggattataaaaatgatggcagttttgggaaggtaaatgcgggacttgaactggtctaccagaaaaaaacagtgcaggcaagcttgattagaaatgtcatcaaatttttaccttggcaactcggtcatatgggcacgattcatggcttctatagtgattttgatgggttattcattgtcctttctatttcagcgactttactcgcagtttccttactggcaatgacgatgcttagaaaagataagaggcatctaggagacttgctagcccatacgcaagtgcaactaaaagaagcatagggtacagattgtttatcctatccttaaagaataagacaaacatagttaggaagtatctgtatgaatgagaccgttgagtttacaaatctttgtatggtaagagacggcgatagagttcttgttattgatcgtaaaaaagaggactggctaggcataacctttcctggtggtcatgtcgaagcgggagaatcatttacggaagcagtaatccgtgaagtgaaggaagaaactggcttaaggattgcttctccccagatttgtggaatgaaagattgggtagaagacggcattcgttatgtagttctcttttataagacagaaaagtttgaaggagacttaatatcctctgaagagggggaagtctggtgggaggacctgaaagaattgccaaatctagacctctccttagatatggaggatatgcttcgtatttttcttgaagaagacctgtctgaatttttctactaccaagatggagaagactggaagtacgatttaaagtaaatttggatactgattcttctaataattaacttgataactttttttagcagttaacccaatggttggctgtttttcttttttaatgactgatttattcgtggaagcttgttataataaaggagggaagtaaataggaaaatgatcatcttctgtttataaggtaaaggttgacatgccccttggggacaggagtatcatatagtaaagggggtgcaagatcatgttaagaaatgatattcaaagaataacagctttaactcgaaaagcactagaatactatgaagaaaaaggttttattcatcctcgaagactagaaaatgggtatagggaatattcggaaaaggatgtagaggttctgaataagattgccttgtttaaaaaattagggctaaccataacagaaataaaggactgtctgaagtcagatggggctactgcatctagtattctcagaagaaaagagcaagaactagaaagtgatgagaaacggaaagtagtgttcgatctctatatcaaaggtgcagacacggatctgatcaatgaaaaacttgcggtcatcgaagctgaggactccatttataagagactcgaaagagcatttccaggatacttggggcaatgcttatttgctgcgtatcaaccttttttacaggagcccttgtcaaaagatggagaagaagcatttaagaagtatattcaatatttagatagccttccaacctttgagctaagcagagaagaacaggattatgttgatgaactgagttctagttttcatatgaagaccttaaaagaggttaatgaagctaagatagctgcggtagaaagttatgaaaagtggcataatgaaaataaggacacaatttctatttatgatcgctatttgaacagtgatgattacaaaacaagtccaatgaaaaatattcaagatcaactgaaaacatttttgattaaccatcactactatgaagtagctattcctctgattagacaatttagtaagagttacgatcattattataaaaaactaactgaggcaagtgactattatttaaagcaaaagggagatgctccacagtaaatcggaaatcaatatactttataagatttaacgattaagagatagagtgagggatgacttgcccttgctctatttttcagttcctttaattgtacttttccctacataggtgtataatgtgtccttagataaacaaatgaggagtttactatggaattaaaagattttacagaaaaagaacaagaacaaatcaagcaaggattgagcacggctgagatttctgataaagaagcagcgaagaagttacttgctcttgtaccgcaagaatggattaaacgcattcctttctttgtcagagggcatgcgacgaccaagacagttgagcgtgtagccaagcaataccctgaactctatgcggtggcaaaacgtcaaggggaccttcctgaaaaagaaggcgaagagctccgcaaaattatgacagctatctttgaagaaaagatgaacaaacacaagattaaataagagttttaaaggaaatgtatttatttctacaattacgattaaacattccgtaaaaaagacaatatcagttttctgaattccagaattctaatattgtcttttttcttattttttatgctggatcaaaacgtaaaaggctgttcgcttattgacattggcaaaaacatgcttttttatcaatctgtttttctattagatagattgtcagtttccgactaaagttttgaaaatatcatcatattcatcaaaaatatcattagtcaaatcagagtcaagattgttatcttctttggttgaatttccttcttttacagtttctactaccatttgcctacctcctttggagtattatatcaaataattaatagtatgtaagaaaatagtttttttaacactagatcctcaactattgttttaaaatcagtattattatagtagagagttttttctttctgtttcaatctgtttcttgttataatgaacttaagaaactttaaaataaatgattcttacaacaattattagaaggaaccattttatgaaaccatccaaaaaaatcatgctccttactagctgtgccttggcgatctttgctttagcggcttgtgggaccaaccaaaagcaatccaaggaaaaacaggcaagctccactgtgcagaaatctagttcagataaggagcgctacaagggaagctacagcaacctcaacagcaaggcaagtgtcgaagaagtgcggactcttttgtctgcttatttggataaggacagtgtagataaatttctgggtcttgtaacggattacgatagcattgttggctcggtcggcttgacgggtgacttcagcaagttcaagaaaacagactacaatgttgagaagatcagtgacttgtggaccaagaaaaagggcgatttcgtcgggaccaactgccggatcaatagttataccttgctgaagaaccgcatcgagattcctaagatgaaagcggatagtgaactcttgttcgtggacaatgatgcgattgacaaagggaagatcttcgacgaggtagacaaggaagcttttaacattctttattcacgggttccgacagaggcgacaacagatgtcagggtacatgccaagaagatggaagaatattttgctcatttcaagtttaatgaaaatgcgcgcatgctttccgtcattgttcatgataacctagatggcaataccctttttgtcggccacgtcggtgtcttggttcctgccaagtatggctatctctttgttgagaagctgaccttcgaagaaccctatcaagccatcaagtttgcgaccaaggaagatgtatacaaatacttggagacaaaataccaggactacacaggcgaaggtctagccaagccctttatcatggacaacgaaaaatgggttgagatgaaataagacccccaaatggaaagtgacaattttatataagattagaaatctaggaacaaaggaaactatagaaaagtgaggataacgaataatgaatcaaacagcgaaagaagagtatattcgtatcgttcggttactgactgaggacagctctatctatgatgctattgaaaattgcttagaatcaccttggtcttattttgaggaaaatattgatcgctatgatgagcgtggaattgatgaggatgaaacagaagaaactattatttggcttggcattgcagatgaattgatagatgcgaatgaagctgttgaattagattggaatcctgaattagaagattttagttacttcatgaaatcactggctgaaaagaagaatcttcagatggaagatgattggtttgatgaggaggacactattacgaattggtgctctattctcgataggaaatgggaaacagaaggtttctgtgtaggtggaatagacattgatagcgatagttacgtcctatttatttgtgaagtggagacgctaaaagaattaacagaatggagcaatcgcatcgatcagcgtattgatcatgcaaaaaatctctaaggcaaaaaagtggtgacagctactatttaagaactgacattaccaagtaaaaacaggaaggagagcgagaatggctagtcatgtgatagagtttgaaggaatgcaactatatgctccgattctatttgtgctagttttcttgctctttttcactgttctccttttcctgataagaagggcaatcgtaaaacgtagtggtggtcccttttttacccctttccatattagccgtggaatcttctatatccatgtcgctctgtgtttcagtcgtcgcagcatcccactgaaagagatcaagcaaatcacctatgcaatttttcgtggacgatctggtggtgggagtcgttatgctttctatatcgagcttagaaatggaaagactattcccttcttttttggaaaaagtaagcggaatgaagagctagtgaataaactcaaacgaaatgctggcaggtatgggtttaaagtacatgatccaggttagaatataatcatctgtagtaatagaatctacgatttgtttcctttaaaaatgaaagcgagtagtcatatgaatgattctatgaaagaatatatccatcttaaaaagcagttccaagagcaagagaaggattcatccagcgtgctggctctctatgaatttgcggatcggctgaccttactggaaactccagaagccaagcaggtcttggtggatgtttaccaagagttgggcttgtatgctagtgccttttcctttttcttagagctagtagacaagtctgatcgcaagcaagttaagaagctttttaccttagaaaagatgagtctcagtcatggagatcgctttgctctccctcgtcctttgactgaaaaagaaaaagagactcataaagagaaaatcagttccttgccaaccttccgctatcatccggatccactagggactggtgcttttaaggaaggggagcctaagacctgtccttcgtgtggggaagaccacaccatctattatgctctgagaccttattgtgtggaggagctaagccatctctgtccgacttgtattgctacaggtcgtgctgcccagaagtttgaagcagagtttatccaagatgctgattggcaaggagtcatggataaggaaaaagaccagatcctattctgtcaaactcctggctatagtagctggcagggcgaatattggctctcttgttgccaagactactgtgcctatctggggacagttggcactcgtgaactggaagaaatgggcattgctgagcaagtcttagcagaatacgagtcacgtaatgaatttcaggatgtggccgaatacttagttaaggatggttctatgtgtggctatctctttcgatgtctccattgtgaacaataccatctgtgggttgatgcggattagggggatgctccaaatctaatagagtcatgaactagatgaaagaatagaaaaggaatcacgaatgagtagaaagcaagccctatctatgtatttgttagggacctttggtcaagtattaggagtcagccttctggtgtggtttttaagagcaggaggaacgaaggttgattttacatcaccaatggggatgatcgctgttgttttaggtggcttatcatctgctttttggggtagtcttgctagtattggctaccatcaatctagttttaatcaacttctcaaagatttttttcaagtcaaagacagtttagcaaattattgtttggtgcttgttttcttgctactcgactttttcccatttatcttaggtggtaagattaccactcaatcgttggtcttgccagtggtgctctttttcaaggctcttctttttggtggagttgaagaaattggctggcgttatttctttcagccaactttgcaggaaaaaataccttatctttcagctactttgatcaccttttcagcctggtctagttggcatctactatacttttatatcgatggttccttagctgtcattcaattgtttccgtttctagtaggtctgctaactaactgctttatcttatcggccttgtatcataaaacgcaaaatttatggatctgtgtcatgactcatgcctgtattaattccttgtctcagattctagtgaatgaagatggatggctatctctagtcagtaaaattcttattattagtttagcaatcatgattgcaagaaagaagtatgtaactctaaaggagaaataatgagcaaatttatttcaaaacaatcagtcgcgatctggtatgcattgactgccctccttgctacctttctagtagggcaagttatcctttggtttttccctgttgggactagtataggtgcctcactactgtttatcctaatgaactgtattcccctgattactgcggcggtcttttctcttgtcctgggtgaagtcaaatccttgggtgattttttcaaaaaggtctttcttcaaaaagaaagtttcctatcctggatcctagctttcatcatccccatcatttattatgggatctccatcctgcttatgaatgttcgctttactgggaactccctctttgccttcttcctatatttcccctggacctttttatatggaggcctggaagaagtcggttggcgttggtttttacaagatcatctttcctttagtaagcactttatacctaaaatgatggttctatccattgtctggttcctctggcatatccctatttatcaactcccttggattacagcaggttcgtccaactatctcatcttttacctgatgattttagggaataccttcctatttggagcgctcaaggagtactcgaaaggagctgttccttgtatcctggctcatatgctgatcgatagtctggctgtccttatgctggttcaaagttctcttcctcagatcatccttctagttattttcgaaatcctagtagactcttggctagtggctatacgaaaatcattgaaatagggttatacctctttcggtgggagtctgtcatatttaccctttaggactttaattaagagtccataaaatggtataatcagtttaacgaagaacctagagataggatcaaagtatcaacacagtgtcattcttatctataatgagagaggggcaagaccatgcaaaaaacctttcagatgttgcgaagaggagatctagaggctatccgtcagatattggataaaaagcctgaagaagtcaatgctgtttcgggtgacaaacctaaaagagatcagggacagtcgctccttcaagtcgctatcaaatcgggacatttagatattgcagacttactcattgatagaggagcagatcttaactttattgaagagccgacagagctgaatccattttgtcaaccagtcctccaaacagcgggtggacgagctgtatttgactgcaggcgcatgatcaaacgttggaatggccaatatgaaatgtattcgtctaaggaaaaggcggatcagtctttcaaggtttttgagaaaatgttggaacttggggcagatatcactcagaaggatagtcatgggggaaccttattgcaaaatattttaatagaaaccaaggaagttctgccatcttattattggaaaacaaaagaaacaagcgataatgtcctcatcacggatgaattacgtcatgatttaaatcgtatttatgatctattaattcgttacggtgtgactgctgacgaaatagctgtctatcagaagattcctctcaaagaactttaccaggacagcccgactatggaatttttaaatcgtttaaaacagcgcagatctttataagcgtatgaaatatgactttgaagagccttagggctcttttatctttgtcagataaagctggaagcagaaggaaaatttagacaggaatttattaaaaaaatggatacaaatcctagatgaaatagagtatactagtttatgaaagaacaagatttttaagtacctaattcaggagggcagtttatgtctcaagaaactttcatcatggcgattgaccagggaaccactagttcgcgggctatcatttttaataaaaaaggcgagcaagttggctctagtcaaaaggaattcactcagatttttccgcaggctggttgggtggaacacaatgccaatgagatttggaactcggttcagtcggtgatcgctgaggtctttattgaaagtggcatcaagcccaatcaaatcgaggcgatcggcattaccaatcaacgggaaacgacagttgtttgggataagaacacaggccttcctatttacaatgctattgtctggcaatcgcgacaaactgctccactggctgaagaacttaaaaaccaaggctatgtagaaaccttccaccaaaagacaggtttggtcatcgatgcctacttttcagcaacaaaagttcgttggattttggaccatgttgaaggagcacaagagcgtgcagaaaaaggagaattgctctttgggaccattgatacttggttggtctggaagctgacggatggagcagcccacgtgacagactattctaatgctgcccggaccatgctctacaatatcaaggaactgaaatgggacgaagaaattttggaaatcctcaacattcctaaggtaatgcttcctgaagtgcgttcaaactctgaaatttatggcaagacagctcctttccatttctacggtggacaagtaccgattgcagggatggcaggagaccagcaggctgctctctttggccaattggcctttgaacctggtatggtcaaaaatacctatggaactggatctttcatcattatgaatacgggtgaagagatgcagttatcagaaaataacctgctgacgacgattggttatgggatcaatggcaaggtctactatgcccttgaaggatctatctttatcgctggaagtgctattcaatggcttcgtgatggcctgcggatgatcgacagttcacctgaatctgaggcctatgctttgaagtcccagaaccaggatgaaatctatgtggtccctgcctttacgggtcttggagcaccatactggaatcaagaggcgcgtggttctgtctttgggcttacccggggaacgaccaaggaagactttatcaaagcaactcttcaatccattgcctaccaagtacgcgatatcatcgacaccatgcaggtagacgccaaaacacctatccctgtcctaaaagtagacggaggagcagcgaaaaatgattacttaatgcagtttcaggctgatattcttggaatcgcgattgctcgtgccaaaaatttggaaacaacggccctaggtgctgccttcttagctggtttgacagttggctattggaaagatttggaagaattaaaatctcttcatggggcagcccaaatctttgaaccaaagatgaatgaatcccgtaaagaagagctgtataagggttggaagaaagcagtcaaagccactcaagtatttgcggagtctgatgactaaagggactcatcaaatgaatagtttatgagagagagtgggacagaaatcggtaattcgttagaattcgatttcgtcgtcccacctccgcacagttgagtagggctgtaaaagctgatgaaatcagcgtagtagagcccactcaaccactgcgtcttgatcgacaatccaaaaataattgagaggctaggacttttgtcccagcctcatgtagcttttacagaatagaacagttatctgttttggttaaaagccatattctattttatttatcactaaataaaaatatcatataaataacctattttttttcaaaaaaataggttagagtttgaagtgtttttcacaaaatagtatactgttagcatagttttgtcggaaatttatgatagaccccatcaaaactagttgtcaacccttgctgttctatatgaacgtttgctggtatcgttgataccaaggaggaatcatatgtctaaagtagctattgtcacaggtgctggtcaaggaatcggttttgcaatcgcaaaacgcttggtgcaagatggctttaaggttggagtattggactacaatgctgaaacagctgaaaaagcagttgctgagttgtccgcagaaaatgcttttgcagtcgttgctgatgtatccaaacaagcagaagtggctgcggcttttcaaaaagttgtcgaccattttggagatttgaatgttgtcgtgaacaatgcaggtgttgcaccaactacaccacttgatacaattacagaagaacaatttacacgtacatttgctattaacgttggtggtgtgatttggggtgcacaagcagctcaagctcagttcaaagcactcggtcatggtggaaagatcatcaatgcgacttcacaagcaggggttgtcggaaatccaaacttaaccatttatggtgggactaagtttgctgttcgtgggattactcagaccttggcgcgtgacttggcggattcaggcattactgtcaatgcctatgcacctggtatcgtaaaaactccaatgatgtatgatatcgctcatgaagttggtaagaacgcgggcaaagacgacgaatggggtatgcaaacattcgctaaagatatcactttgaaacgcctttcagaaccagaagatgtagcagcagcggttagcttccttgctggaccagattcaaactacattacaggccaaaccattatcgtggatggtggaatgcagttccattaagataaaaaacagaggttgggatcaatatcctaacctcttattttttatgctatttagttaatacaatggtatcagaaggatcacgatcgtcatcttcaatagtgagttggttaccttctagtttataatatttgagatcatcccccacagtgagagtatgattgtcagtgtgaacggttacaggcttgctttctttctcgccatccctttcaagctcctcccatgtgcccgtcgtaccagagagcgtcagagtgatctgatcagtttcatcagttcccttgtatgtcccatctagattttcagcttggctagacgtttgagaatctttagagcttgaagcactcgaagaaacctgttgtgaactagcagagcttgcaggtgtttgagttgtctgattcgagcaggatgctaaaagaccaagaactgccagtgaggcaagagaaagtgtgaatttattggacaatgtcatcgacttatctcctttctttgataatccaagtataacagaggatagaggagaagacaatgaaaacgatttttcagaaaatggagaaagtgttccttatatgttcatatttttagatcaaaaaaaccactccgaaagggaagtggttctgtgttggttcttatttgagaccgtattttttgttgaaacgatccacacgtccatctgcttgagtgaacttttgacgtccagtgtagaatgggtgtgagtctgatgaaatttcaacacggatcaatgggtaagtttcaccttcgaattcaactgtttcgctagagtacttagttgaaccgctgaggaacttgtaaccagtagtagtgtccatgaagacaacagggcgatattctggatggatatcttttttcattttgcaatatttcctttctgccatggtctctttccgagccatagattgttactaagctagtttatcaaatttctaggatcttgacaagtattttcactaattttatttaaaataatgatcaaaaaatcaccttggctaagccaaggtgatgatgatcagattattgttcagattgatttggatcttttggtgcttcaactggttgatcagcttttccttcagtgtgttcgtgtgattcttttttgatttcatctacagcagttttaactgtagaagttgtcacacgtccaactgtttgggcaaatcctttaccagattcagcaagttcttcgaaggttcctttagtgattttaccacctgacatcgccaagagaccagtcacaacaatagcgattgatgcgatcaaagcaaggatcaacccaaagccgattgaaacgccatagccattgaaattagcagtgtacttgttcacaccaaatacatcgatcaatgcaacgacagttgcgatagcacctgagacgataacaccaattgccaacccttttggcattgaagctttcacatcgctcaagcaagcaagaacaagcgcaacgactgctaagataaggatgaaccatccatctccgttaagaccattcacgctgtatgaaccaaaggcaccagcattcaggcttgcccacggcaagaaagagctaagaatcgctactgcagcagagataatgataaacaaacgatttttttccataataagtctccttataattttgctagctttattttaccacaagaaatgacaaatgaaaaccccagaaatggaataaaaaaggctgagaaaccgttctcagtctttgtttgtgcgagccacttcttgtagctcttggtagatttggtcgttttcttcaagggaataggagttggcaccactagcaagtggatgaccaccaccgtcatggcgtttagcaatttcattaatcacttttcgtttgctacgcatccggacacggaagtgaccgtcggcctgctcgacaaagatagcccaaacagacacggtatcgatgcgtccaggagctccgacgattgcagcagtctctgaatcacgtagatcgaatttcttcaagagctcttgtgtcagggtcacacgcgcagcgccatgttcatcgatttcgagatggtcataaacatagccttgaagcttagcagttttgagattgatcgtatccatctgacgagcaagtgctgtaaaatcaaagggaatgcttcgaagataggcagcgatctcaaaggttcgagtcgaagtagcaggataaaggaagcgacctgtatcgccgacaatcccagcatagagaagacgcgcagcacttacaggaagttcgagctccaattcctttgcaaaaagtgcaattaactcactggtagagctagactcagtatcaacccagagcagatcgccataagcatcgtcatttgggtggtggtcgatcttgatcaggaaatcaccattcgaatagcgcttgtcatcgatgcggggagtattagccgtatcacagacaatcaccaaagctccagcatagtcctcatcgctgacagtatccatctcagcaagccaagtcaaggtcggttcatcatagccagttgccaagacccgcttttgagggaagcgcgcacgcaggagatcccgcaagcccacctggctaccaatcgcatccggatccggattttgatgacgatggataataatcgtgtcataagcttgaattttttcaagaatttcattcattacgttcatacattacctcattttctctgtcaattttaacataagaaaggctcatccagcaagcatttatcactaattaggagctatggaagcggttttacagaagatcaatattttggtagaatggatgaatagatttagtatgggagggactaggatgattgaaattaaaagtaatgctgagacggcacaagagttagcggcttctttaaaaagtagtggagatgcactttcgggagttgcctcggcttcaaaagatgaacaaaccaaactatctggtaatgatgcggcccatcaagccattgatactgctaaaaccaaagcagaagaaattgcagcggcgattgaatcaatcgggaccaatcttcaaactgttgcaaatggatttacagcggtggatgaagcgactgctgcgagcatgcaatagcttgagagagtaggaagatgaatcacgatcaacaactatcggaattaagaagacaagaagaccaacttttccaaaaagaaagagaaattgtaagagaaaaaagaaatctggaagatgagttgaaccgctttgagggctatagctctgatgcgcaccgttatttatgggatgcatttgaatcctatccttcctctagaaatttttttgaccaacttcaagaggaatttcttcatgaatcgcgaaaaatttcaaatagttatttagaagagctggatgaattagctattcaaaaaagaaaagtcgaagatgatttaaatgatatctatcatgaacggaaaaaattaatgattgaaaaggagtgtgacgatgggaatcgaagtttatcgaggtagtttggatagccaagctagtagcacaggtacgatgattgagcaacaattgaaagcctatgaatcactagaaacatcattaactcaaatagaaaattctgcctcgcgcttgtctggccaagcttacgactcttttagaagctttgtgacaagtgttgtccagccattgaaggaggccggtgtagctttagtagaagctacacaagaaagtgtgaagaagcttccagcatcctatcgttcggaggtggctgacgaggacttacaggaagaaaagttggtttctgatattgaacagtgtgatcggatgattgctatctttcatgcagagatcaatgaaattgctgctagtaaatcgactagtgctggagattttcaacggttgcagagattacaaaggattcaaggattaaacgtattagaaagtatttttaaagctactaaaaataaactacaagaaaaattaaataaactcagagcgtttaatgcatcatcgccaagtatcttctgggaaattgatgtcttagcccaagctattcaaatagctgtcaatcaaattaacgtagcgtggaatccaaatactggaatgtattctattccaaaggatttatcctggtcagatctcgtaaatgaaacgattaagaataaagagtttgaaaatgaatatttgccaaagaaaccaaaggatgtaacagcgttcgaatataacaaatttcttacgggattacgtgaacaatctgtgaaccttaaagaaaaagatggctgggataaggatgctatcaaagcctatgttaaaagtgtttcaaaaagaactactgatgtcaagacagccagtgagttaaatgcaaggagagatgctttgtatgcagaaaccaaggagattggatcagatatttatacagagatgtatgctgctagtaaacttgattcaaaagcgaaaatagaacttgttcttaagcaattaggtgcagaaacggatggtaatcagtttatgcatttgacaagcaaaacgcataagatttcagagaacctagcaccacacggtgatttcaacatgtatttcagacgtgatgttgtaaaagcatttggtgataaacatcttaattacaaaaaagatttacttaggcagcaagttcatttcttccgctactatttggatcgccaagcaatttactatattcgcaatcactacgaaggcgcaactgattacgaaaagctattagcatatggtaaagaaaataatattgaatttgattacacaaccggctctaactaccataatcgctttaatccaaaagatggcttcaaacgtccctataatatgaaggttcaagtccctcagggcaattcagctaaaggaaaagatttgaacaatgcacggatggtggaatttattgtgaatatagacaccggcgagtttgatagccaatgggatgcctatgataaacataaactagcagatggtagctataactcagatctaagcgcatattctgatgatgaatttagggaaattgccaatacggaatccttcaactatggtccttcaaaaggtcaaaattcagatgttactaagttttacaaaggtaaacatggaatgcttgatgtggatggtactcctgagccagccactcgatctgaagcaaaaaaacaatttcattcagaatctgatttgggtgacgtggataaagatacaggacatgtaggtcaatttgcggatattgtaagaaaaggaggacatgaagattatgaagcatggcaacgaaaaacaaaaggaatgtcagaaaaagaaaaagaggaagagtataataaatttaaagcctctcttaatggcgatgctagtaataacaatggttacagttattatatttatggtaatgagaaataggaataactttgaagattcaaaatccatattagaacaacagcggtttattgttgtggatgattcgggcgatgaaaatttatatcgatcttattttgagaatggctatgacttgaggagcaataattcttatagtaaaactcaagtagtagtaaaaaatggggaaaaatatggcagttattcggacgaaaaaccatccgataggtatcatagagacttataccgaaatattacttccgcaattttgaacttaaaagtttcaaaagaagagatcgaaaaatcaaactttgttattgagcgagatccgaaatcgttgattactaaatctctagtgaaggaagggaagacacctgattttgaagccaaagttttaaatgaaaagaatcaattttccaaagttcggatcacctataatcaagattatttaccgatcaaacttgaatggtattttaaagggaaagatgggttgaagtggtacacctggagccgtttttcatatccatataagactgaatctgaatttaataaaaaactagatgaagaaatccagcgtattaaagatattgaagaggagtacgagttggagaagaaaaacggataataattgaacgattaaagcaattcaagaggaaaacaagggcgattaggttgaatcggtcctaattcttgaaacgtgtcccttctttcaccttatcgggaaaggtttcgtgcaaaatgcttgaaaaagtggtataatacgggaaatagcttttgggaggaaattatgactgtagcgaagattgtttttgctagtatgactggaaatactgaagaaattgctgatatcgtagcggacaaattccgtgatcttggtgtcgaagtagatgtggatgagtgtacaactgtggatgcggaggacttccttgatgcggatatcgcagtggtagcgacttatacttacggtgatggagagcttccagatgagatccaagatttctacgaagatttggctggccttgatctcaaaggcaaactttacggtgtggtaggatcaggtgataccttctacgatgaattctgtaaagcagttgatgatttcgaccgttgcttcgctgcgactggtgctgaaaaaggttctgagtgtgtcaaagttgatttgtctgcagaagacgaagacattgaaaaattagaagcctttgcagaagaactcgtagcaaaagcaaattaatgacaaagagggtggatcgatggatttcagcctcgatttatatccaaaataaagaggagacacatggatttagatcagattcgtaaggacattgaccagatcgatcaagagcttgtagccttgctggaaagacggatggtctgtgtcggtcagattgtaaaatataaggagcaacagggcttacctgtgctcgatcaaggaagggaaagagaggtgcttgagaaagtcggctctctcgtgacggatgagcaatatcgtgcaaccattcaagctcagtttcaagatatgatgaagcgctcgagagacttccaagaggaggtgagggcgcgtgactagtctatcgatcaagcaaaaagcacaacagtatgtggtcctaacagggatggctcttttcattggtctcttggttggtgccattgatatgatttttggacaaggtcttctcctgattggagattttcgaagccagcattggcctttaattctttttctggccttagcggggcttgtcatcgtttatctttataaacgtttcggtggcaaggcttcaaaagggatgggccttatttttgaagtcggacacgcgcgtgaggagaatatccccttggtcttggtgcctttgattatgctgacgacctggatgagtcatctctttggcggttcggttggtcgggaaggtgtagcggtccagattggagcgaccctttcgcatcgttttgcccgtcatatcaagattccagatgcttcgcgtatctttctcatgaccgggatggcagccggttttgcggggctctttcagacgccactcgcagcaaccttctttgctcttgaagtcttgacagttggggagttgcagttgatggctctctatcctgccctcatcgcttcgattgtggctagctttacctcgcatgcccttggtttagagaaatttgcagtgccactaagagaaacgctgagctggacaccagagaccttgatcaaagttgctcttcttggcttggcttttggccttgctgggaaactctttgtggttagcctttcctggttgaagaaaactgtcgctcaagttttgcctaatccttatatccggattgcgcttataggggctggacttagcttggtcctcttgaccctccagctgaccaaggtcggcacatacagtggactaggtaccaatctgattgatgtggcttttcatcagggcagtgcgcagagttatgactggatcttgaagctcctctttaccgtggtgacgatttcagctggataccaaggaggagaagtgaccccgctctttgcgatcggagctacacttggagtctttcttgctccgatgttaggtctacctgtcttagtcgtggccgctatcggatatgctagtgtctttggcagtgcgacgacgaccttgctcgcaccgatcttgatcggaggagaagtctttggctatgccaatcttcctttctttgtcattgcttgtgccatcgcctattgcctaccaaaagagtggagcatttattctggtcaaaaagttgcgaaaaagtagagaaaagagctttacaaacctgaaaatatctgatatgatagtttttgtgcgtaatggaagcacaaaaatacagtttatccgctgagggaggtccctcaagattgacgaagataggagaataaaatgaatccattaatccaaagtttgacagaaggtcaacttcgtactgatatccctgcattccgtcctggtgacactgttcgtgtacatgcgaaagttgtcgaaggatctcgtgaacgtatccagatctttgaaggcgttgttatcgctcgtaaaggtcaaggacacactgaaatgtacactgttcgtaaaatctctaacggtgtcggtgttgaacgtacattcccagtacacactccacgtgtagacaagattgaagttgtacgttacggtaaagtacgtcgtgcgaaattgtactaccttcgtgcattgcaaggtaaagcagctcgtattaaagaaatccgtcgttaagacgaacaatgaggcgggagtgatctcgcttcttttttatcggtccccttagttcaatggatataacaactccctcctaaggagtagttgctggttcgattccggcaggggacataaatttatgacgatgagggaatttctaattgaataggaatccctctttcgagactttccttaagtgaggacggacgttagtgaacaaaaactaaaaatttatgtacaattgactaaactagagctaaaccattgatacaactgaattagaagcataaagtacattctttaaaaaatgtactttatttttttgtacattattctggattggtattttttatattttatagttcatcatattatcaaatctaagaaattgatttgtacatttttttcaatgataatcaatgtataataaaaaattaaagttcgaatttctgaaactactttcacatataaaaaattgaatctaaattgctgtaggcctataataaagatagggataaaaagaaatcttcctagaaagggctatactgtatcatatgtgacagtattattaatgaatcatgaaaaaaataattactacagtacagtgcatcttgttccccgtgtctccttacatagctagagaactatgcttgatgagtaaaaatctagtcgataatatgttccttacattctttatcatgctaacaatttctttttggcttggtatttggaagttaggagatcttgcgggaaatccaaaatagaaagtaataagttgtgctagagatgaaatttctatttattttaattatttctatgccttatttcttttattttaattggaaggataagcctaaacaaaaaaataagtccttttgctatctttataagttttatatgatttacttgtggtttatcctcataatttccataatggctatcggtattttatcccttggagtagtagctggtatgggagaaaaacttacgttcgatctctctgttttatcttttttaggtgtagttttatttagtttatatatttttagtattctaaaagagataaaggacttaaagcaaataaaaggtaagtaaatattaactaagagaactagctaactagcttaagtaaaatataacacggccacgattcatgagccgtgtttttgtatgaatgtacaattgaaaaatttttaattttcatttaaataaagtacattttacggaggacgaatagctttaaaaatttccagtgttcacttaaataaagtacataattgacaatgattagctcaaaaaaattttttggttactagaaatcgtagaagttccgtgactaattcttgagcctaaggcacttttttcacagcggaaagtctctacagaaaataaatgagaaatgttttataaaaaggagcttatccaccttctaaagaagctcgtgaatgcgagttaatttgtaaatttaaagttaaaaagagatggaatgtctccacataatgaattgatttttgaagaaggaaggagtaaaataaagttcatataatgactgattagagataaataaaacaagacaaaaaaagcaccgaatcggtgcacactttttcaagtcggatacggaaaaagtcttattttaacttgctgtgttgtttcgaatggtcacaaaacttatttttttgtatgatataacagaatattttaaaaacgaaagggctttctgtggaaaatgatgtgttttttgattattttttaaaatcacttaggttttattttcgtgataggtgtaaggatattggatttataaagttttttaaagatgaaaataattgttttattactatagaggattatgttttggaatcatttgtagtattgtcaaatattttgagtaaggataggattgtgttttcttgtggaattatttatagtaagggggtagttactggagtagaagtatgtatggatgtattagagttagaaagattaaataaattatttaagatatagttttgaagaatattaaaaaacataagggaaactgtttatgtggaatgtgtggagttgatagtatcaatgtttcctagttatagagctgtgttgtttcgaatggtcccaaaacaagtaaaataaaagatgatggtatagaagcttgttacattgagcttctttttctttagaaattcaaatcataattttacagatttttatgtcattaatttactcctccccctccactttttctttgactctcctttcttatttttctaaaatagtaggtatgtgaagggagattgatatgaaaaaaagtttggtaattgtgctttctgctttggtcttggcttcgtgtggtcgtcctcagagaacggtgacgcctaagagttcggataccaagcagacaagcacttcggaaaagaaacagtctggtatggatttgaaagctattaaggctaaggactactcgagtatcaaggggacttggatcgatggtcgtggcaatgagctggtctttgatgacaaaggcttggtcagcgaggatgttgagcttgatgcatcgagctttaagcataaggaccagattgctgagatgacggttagtgctaagtcgggtgttggaggctacggtcttttgctccttccaaaaggtcagaaagcgggcaaagacgatgtttcggataagtccaaggatcggatctgggctggtcagtcaccagcttatggcgatgatgacaatttctactatcgcaagaaagagcaaccgaaagatcgggagcaagtagatacagacgatagcagtagtacgtctaaatcgagtaagggtaagaagtggaatactcgttcggatagcgaggttaaatcttcgaagaaggcggataagaatgattatccaggctacacagatgctcaggtcgaagctgcgcgtgtctgggcttatgtgatcaagaacgtgccatcagaattaaatatttcaaatagtgcagctggaacaaagatttataatggtggcttgggcgttgattatcccaaagatgtccgtcatctgtttggttcttattcagctgaaggaaatatcacttatgcatccaacggtgatgggacggtgacgatctatcctgttccgagtcattggcaacagtctgcggatgagctcaatagtgaggagtttatgacgcaatttacccaagggatcttggaccatgctgaaacggtgacattgcctgatggggatccagacatgattcgccagatcctagccgtattgaagtaggagctggatttgagagctcagtttattgtttttttgagctgatcctgttacaatgatagtacacggaaaagactgggcttccagcctttttcatttcaccatagaaaggtcttttatgaaacgcaaatcgattttgtttctgtatttactcttgctagcgattgggctggcctatgagacccaatcgctgacggaaggctggatgtctggtagccagtacgggattgtggggctttcgaccttgatccttttggtctatgcgcttcctgctgtttgggctctctttcatttttctaagaagtggaagttgtcttgggtaccggttctcttttctttattaggtgggggctttgttgccggttggttgtctagctttgccaatacctatttccatgacatgattcaagcgatcgctccaaatagcgacttttggaaccagtacgagagtgccatcgctgcgcctctctttgaggaaccctttaagttgattccgatcttctttgtcctctatttgttcagtgtccgtcgcatcaagtcgattttcctcttggctattgcctctggtcttggtttccagatcgtggaggactttgcctatatccgtcaggatctgccggaaggtttctcttacacggtgtcagggattctcggtcgtgtggccaatgctcccatgtctcactgggtttacacaggtcttgttatgctgggactcttcctaattgtccaagcaagcaaaggacgcaaggatttacgtctagtaggctggggatatttagtagctgggtttggactccattttgttggcaattcacccttctcacaaatcgtgaccgagttgccgattgcgattccagtcttgaatgctactgggctcttcctaatctaccaagcttatcaaaccgtcgagcgattagaacaagcaaaataaaacaaaaaaagaatgagagtgggacagaaatcggtaattcgttagaattcgatttcgtcgtcccacctccgcacagttgagtagggctgtaaaagctgatgaaatcagcgtagtagagcccactcaaccacagcgtcttgctcgacaatccaaaaataattgagaggctaggacttttgtcccagcctctttttgttatattggacacattttttatctacttttgtataaactgagtgatccgatagctgtaaaataaatgctattttggaagatatatttgagactttccgttgtgagaaaagtgctagaaacaatcatgtttctagcactcgggagttttgaaatgttagattcaaaactaagtcatggaacttcttcgaagttcgctgacgtccgtactcacctaaggaaagtctctaagagtatataatcttaaaatggatttatttaccaagacagaactggctgaagagttgggtgatgagctcatctggagcagcatcccctgtgatttctccgaggatttcccaggtgcgggtgaggtcgacttgaagcaggtctaccggcataccgagggccaagccttcgttgaccgcttgcaggctttcaatagctttctcgatgagggagatgtgacgagcattcgaaagataagtcgcatcttgctcaaccagcccagcattttcgaagaagagggcgttgatccggtcttcaatttgatcgatgttttgatttttcagaacggaaatcttgatatgatcttccggcagttggtcgatttcgatcttctctggaaggtcaaccttgttgagaaggatgatgcggttgctatcttgtgagatctcaaggagttggcggtcttgatcggtcaagggctcgctagcattgagaacgaggaggactagatcggcttccttgagggctttttttgaccgttcgacaccgatttgctcaacgatgtcttcggtttcccggatcccggctgtatcgactagtttgaggggaacgccgttgatattgacgtattcctcgataacgtcacgagtggttccttcgatatcggtcacgatggctttttcttcgcgaagaagattattgaggaggctcgacttgccgacgtttggacgaccgatgatagcagtagagatcccttcacgcaagatcttaccacgacgggcagtcttgaggaggttggtcaagagggcttcaaattcactggtcttttcacggatgatctcagtggttgcttcttcgacatcatcgtactcaggatagtcgatattgacttcgacctgggccagggtattaaggatttcttggcgcgtgttgttgatcaggtcagacagggaaccgtctagttgcttaacggcgatgttcatagccttgtcggtcttagctcggataatgtccatgaccgcctcagcctgggtcaaatcgacccgcccatttaggaaggcccgcttggtaaattccccaggctcagctaatcgagcgccttcgcggatcaccaattgcaggatttcattggtcaccgcaatcccaccgtgggtattgatctcgatgatatcctcacgggtgaaggtcttcggcgagcgcatggctccaaccatgacttcgtcgaggatctcgttcttgtctggatctacgatatgaccgtagttgagggtgtggctagccacgctggccaaatctttccctttgaagatcctttgcgcaatggcaaagctgtctgtcccgctcaagcggacgatcccgatcgccccctcaccaagaggagtggagatggcagcgatggtatcaaattctttagtaatcatgtcatttctcttttcctgtagattcatctctattctatcgtaaagtcagcggacgggcaaggttttgcttttagaactaaaactggaaaggttttcaaataattagtgaaatctctttcagaatatgctatactgtaatagaatataaaaggaggtctatgatggtaaacctaaaagaacaggtaggaattaaagcggctgagtttgtcaaagacggcatgattgtcggtcttggtacagggtcaactgcttattattttgtggctgaattgggtcgtcgcatcaaggaagaaggcttgcagatcacagctgtcacaacttcgagtgtgacctatgatcaggctgaaagtttaggcatcccgctcaaggctatcgacgatgtcgaagtggtcgatgtgacagtggatggcgcagatgaagtggatcctcaattgaatgggatcaaaggtggcggtggtgctctcctcatggaaaaaatcgtcgcaaccaattctaaagactgcatttggatcgtggatgaatccaaacaagtcgcaacccttggggctttcaaacttccagtggaagtagtacaatacggggctgaaaatctcttccgtcactttgagcaaaaaggctaccatcctgctttccgtctcgcggatgatcaacgctttgtaactgatcaaggcaatttcatcattgacttggatctcaaggtgatcgaggatgcacaagctctagccaatgaactggatcacaccgtcggggttgtagagcacggtttattcttgaacatgatttcaaaagtgattgtagggacaccagatggccctgtcatcatcgaaaaatagagagtgggacagaaatcggtaattcgttagaattcgatttcgtcgtcccacctccgcacagttgagtagggctgtaaaagctgatgaaatcagcgtagtagagcccactcaaccactgcgtcttgctcgacaatccaaaaataattgagaggctaggacttttgtcccagcctcggatcaaagaacggctctcttcttatagggatttggtataatatagctagtttaataaaggaaagaggcagtatatgtcgaaatttaaacgcatgcacttagttgtgctggattcagttgggatcggtgctgcaccagatgccaataactttgtcaatgcaggtgttccagatggagcatctgatacattgggccacatctctaaaaccgtcggcttgaatgtaccaaacatggcgaaaatcggtcttggaaatattcctcgtgaagtaccattgaagactgtgccagctgaaagtaacccaactggctatgcgacaaaattgcaagaagtctctcttgggaaagacaccatgactggtcactgggaaattatggggctcaacattacagaaccttttgatactttctggaatggtttccctgaagaaattttgactaaaattgaagaattctcaggacgtaaggtcatccgtgaggccaacaaaccttattctggtacagcggtcatcgatgactttggtccacgtcaaatggaaactggtgagttgatcatttatacatcagcagaccctgtgcttcaaatcgcagctcacgaagacatcattcctttggatgagttgtaccgtatctgtgaatacgctcgttccatcactttggaacgtccagctcttcttggtcgaatcattgctcgtccttatgttggggaaccaggaaacttcacacggacagccaaccgtcgtgacttggctgtttcaccatttgcgccaactgttttggacaagttgaacgaagcgggtatcgatacttatgcagttggtaagatcaacgacatctttaacggagctggtatcaaccacgatatgggccacaacaaatcaaatagccacggtatggataccttgattaagaccatgggacttcctgagtttcaagaaggcttctcatttaccaacttggtagactttgatgctctttacggtcaccgtcgcaatgctcacggataccgcgattgcttgcatgaatttgacgaacgcttgccagaaatcattgcagctatgcgtgaagatgacctcttgatgatcactgcagaccacggaaatgacccaacttacgctggtacagaccatacgcgtgaatacattccattcttggcttatagcccatccttcaagggcaatggcgtgattccagtcggccatttctctgatatctctgcgacgattgcagagaactttggtgttgaaaaagccatgatcggagaaagcttcctagacaaattgaactaagatgacacgcttcgctctcctcgtaagagggatcaatgttggcgggaaaaacaaggtcgtaatggcagagcttcgagaggagcttcaaacgatcgggctggatggtgtagagacctacatcaatagtggcaatatcttctttgaatctgctagttctaaagcagaattggtagatttgctgggacatttctttcgtgatcactatccctttatccagtctttttctctcttttcatctgaggactacgcgcaagatcttgttgctctaccagcctggtggcaggaggatctggcccgcaaggatgttctcttttacacagtaggccttgatcaggatgctgtctgggagctggtctcctctttttcgctcggtgatgaaatcatccatcgtgggaatctagggatctactggggcaaatactcagaagagacctatacaaagaccgcttaccacagacaagtcctcaagatgccggattaccgtctgttgaccattcgcaatgccaatacatttgacaaaattggccaatttttaaggaaatcataaaggaaatatgcaatgacattattagcaaaaatcaatgaaacagctgcttttttgaaaggcaaaggaatggaagcacctgagtttggcttgatccttggatcaggtcttggagaactggctgaagaaatcgaaaatccagtcgtagttgactactctgaaattccaaactggggtcgttcaacggttgtcggccatgctggtaaattggtctacggtgatcttgctggacgtaaggttttggcccttcaaggacgtttccacttctacgaaggaaacccactagaagtggtgactttcccagttcgtgtcatgaaagttttgggatgtgaaggggttcttgttaccaacgctgccggtggtatcggctttggtcctggtactttgatggccatcacagaccacatcaatatgactggtcaaaacccattgatcggtgaaaacttggatgactttggtccacgtttccctgatatgtcaaaagcttacacacctgaataccgtgagacagctcataaagtggctgacaaattgggtatcaagttggatgatggggtttatatcggtgtgactggtcctacctacgaaactccagctgaaatccgtgcatataagacacttggcgcagacgctgtcggaatgtcaactgttcctgaagtcatcattgcagcgcattctggcctgaaggttcttggtatttcatgtattaccaactttgcggctggtttccaagaagagctcaaccacgaagaagtagtagaagtgacagagcgcgtcaaaggcgacttcaaaggattgctaaaagcgattcttgctgaactctaatccaatgaaagtacgactccaaaggctgccctacggactgaagctacttctagctactttatccttgggaataggaacaggtctggtcggaattgcctgtcattatctactagaaggagtgcaagagctggcctttggccaagatacatcggacttgctccagcaatttcaagaagctggaggtctccgtagatttctggtcttatgtgtgactgggtgcttggcaactggcttctggtatgtcctgcaaaggcgttatcagatcctgtctattcgtcaacaaattgacttagctggagacagggaaccagcgcccttagcccacatccttcattcagggatgcaggtggcaattgttggagcaggcgcatcggtcggaaaagaaggagccccacgtgaggtcggggctcttctagctggtcgtttggccaagggattctcactagctctcaaagagcgaaaagtcttgattgcctgtggtgctggagctggtttggctgcggtctatcaggtcccctttgccagtagcttgttcgtctttgagaccttaggacttgcctacagttggcaaaactttctactggttttgaccagtacttatctggccacctgggtcgctcagcccatcgttggtcatgaggctgtttatcacctgtccgcagtttcatggtcggctagtagcttcctacaggctattgtgattgctttcttggtcactcccttggctctggtctttgctttcctcgccaagcgggctagtcacaaacggcgcaaggatgggacgattctttgggctcttcctctagcctttctagtgctggggagcctagtagcctttttccctatctttatgggaaatggccaggtactagcgcaagccttcttgtctagccagtcgattccttatcttccactgagtcttgcagtgaaggggcttctggtttacctcctcttgcgcaatggtgcctatggagggaccttgacaccatcatttgccttaggagttggatctggctatctagtgaccttgcttttgacagcagttgggattcatctggatccagctctagggatgttactaggagcaaccgtctttttagggacgaccttagaagctcctctgacagccattgccctgagtcttggatttacaggccaaacttggaatttgactattccgcttgtacttgcggctggtctgtcatacgtgattcgaaagagatgggagaagaaatgatgaaggtacattttgtactgcatgaaacctttgaagtgccgggcacttatctaaaatgggcacaggagcgtggccatcaagtgaccacgaccaaagtctatgagaatgaaaccttaccagagtcagtggatgagattgacttcttaattgtgatgggaggacctcaatcgccagatgaagatcgggaagcttttccatactacgatcctcaggcagagatcgagctgattcaaaaagccatgaaggcagatcgttatattgttggggtctgtcttggtgcccagctcatgtctgttgcttatggcgcgaactatgagcacagtccagaacgtgagattggtgtttttcctgtgaccttaacgcctgaaggactcaaagatccgcatgtcggtgagtttggagcaactcttgaaactggccactggcatggcgatatgccaggattgacaaaagatgctgttgttcttgcgaccagtcaaggatgtccacgtcagatcattcgcttcagtccgaaacactatgccttccaagcccacttggaatttgatccagaagcagttgatctcttgattgctgctgacggtgaagatgttttggaagaacaaagtcaaaacctgacctttgttcaaaaacccgaagccattcgtgcttacgattatcgagaaatgaatgccaaactctttgcatttttggattcattaacaaattaaaataaaaatgaaaggaagagcatgtgttctaatttgaacacgagcggaaagctctcctaattactcaataaaaaaagaaaggatgggtttaccgtattcgctgaactgaatacgggcggagaactgtgtaaaaaagataaactgtctagcatctgcgatgcgtcgtcagtttcctatttttactttgcctctttaacgcctattctaaaaaaataaaaaagaaaggtagagcatgtgttctgatttgaacacgagcggaaagctcggaaaatagataatctgactgagaaatcaggatttctcgtcagattcctaattttcagtcgctttctggtcgctctttgtatcataaactatgtctatccatattgctgctaagcatggtgaaattgctgataaaattcttcttcctggggatcctcttcgtgcgaaatttattgctgagaatttccttgaagacgctgtttgcttcaacgaagtccgtaacatgtttggttacacaggcacttataaaggtcaccgtgtttctgtcatgggtactgggatggggatgccatcgatctccatctatgcgcgtgagttgattgtcgactacggcgtgaagaaattgatccgtgtgggaacggctggttctttgaacgaggatgtgcatgttcgtgaattggtcttggcacaagctgccgcaaccaactcaaatatcatccgcaacgactggcctcaatacgatttcccacaaatcgctagctttgatcttttagacaaggcctaccacattgctaaggaccttggcatgaccactcacgtgggtaatgtcttgtcatcagatgtcttctattcaaactatggtgaaaagaacatcgagcttggtaaatggggtgtgaaagctgtagaaatggaagcagcagctctttactatcttgctgctcaacaccatgttgatgcccttgctatcatgacgatttcagacagtttagttaatccagatgaggacacaactgctgaagaacgtcaaactactttcacagacatgatgaaagttggtcttgagaccttgattgcagactaatggcaaaattccttcatgatgaatggctctacgatctccaaaattatcactacagccgggctctgcgctctatcaaacagcaggaagaagtaccggatttgttggtaagtttactgcagttaatggcggagcgtcgtgagcttaatatccaacccgtcatgaatcaaaagttgagaaccgagttgctagaggcgactggttttcagcttttttggcatgaagatccagaagatgagcagttggccaactacctctatgacttagaggcgaagttacgaaatgagcagattattgactttgttcgtgccgttagcccagccatctatcggatttttatgcgattgattcagttgaaaattcctgatattaccaactatattcataactccaaagaatccagttatgaccgttggaagtttgagagcctgcatgcgtccgacaaccctatcctgcagcaattccacagcgaaagtgtggtcaattcgtccagtttgacggagttgattgtgcagttggactttccagatagcgtcaaagttgcggcccaacaattgcgggagttagaaaaatcagttcgcaaccccttggcccacttgatcaagccctttgatgaagaagagctccatcggacgacgggtttctcttctcaggattttatgaagaatttgattgaccttgcaagctacacaggcatccattatgatcaagccaacttttattttgatcaggccaatgctgtcatggaagagctactaaaggagaagtagatggataagattgctcaactacaggagatgattgatcagagtcaacggatcgtgtttttcggaggggcaggagtttccacggagtcaaatattcctgattttcgaagctcagacggtgtctatagtgttcaggtagggcgacatttgacagctgagcaattggtctcccataccatgtttgagcgctatccagaggactttttcgacttctataagaaatacctactctacccagatgccaaacccaatgctacccatcgctatctggctcggcttgaggagactggtaagctcaaggcagtagtgacacaaaatattgatagtctccatgaaatggctggttctaaaaaagtcttgaagctccatggtagcgccgaccgcaattactgtacgggttgccagcgattttatgatttggaagcttttttagctttggaaggcccggttccacactgtctggactgtggcaaggtggtcaagcctgatgtgacactctacgaggagcctcttgatatggaggtctttagtcaagcagcccaagccatccaagaggctgatctcctgattatcggtggaacctctcttgtggtctacccagcagctagcttgatccagtatttccaagggaagaagctggttgtcatcaataagaccagtatcccacaagacaagcaagcagacctagttatcgaaggaaaaattggggaagtattttctcaattaagacaataaaaagagagtgggacagaaatcggtaattcgttagaattcgatttcgtcgtcccacctccgcacagttgagtagggctgtaaaagctgatgaaatcagcgtagtagagcccactcaaccactgcgtcttgctcgacaatccaaaaataattgagaggctaggacttttgtcccagcctccttttttatttatcaaacttcacttcctcaagcaagtactcgatgaatttttctcccatttttgagagggctgttttttcatgtttgatgtagaccagctcgattgggtcttcgatatcaaggggaatggagacgatgttgtttccgttgagattgctgttgaggatcccggtcgcaatggtgtagccatccagaccaatcaagagattaaagagggtcgcccggtcactgacgacgatggatttcttatgatgctcttgagagaggatctcttctgagaagtagaaggaattgtgggttccttggtcatagctaaggtatgggaaatcttccagatcagacaagtgaacgatctctttcttggcaagaggattggtcttgctgacaaagatatgaggctgcgctgtaaagaggtgggtggcaatcaggtgattatcatccagcatcttagagaggacatctcgattgtagctattcaaaaagagtacgccaacttcgcttcggaaattcttgacgtcatcgatgatctcccaagtccgcgtctcccgtaggaagagctcgtatttttccatgtcgcttttcttcaatagtgaaacgaaggcctcaaccacgaaggcgtagtgctgtgaagagacactgaaaagctcacgagagcccacaggatttttatagcgctcggacaagaggtcgatctgctccaccacctgtcgggcataagagaggaactccatcccatcgcgggtcaaagtgatccctttaggattccggataaagatttcaatccccatctcattttccaagtccttaacggcattggaaaggctaggttgcgtgatgaagagttgttttgcggcctcattcatagagccggtttcgacgattttgataatgtattgtaattgttgtattctcatgcttttattttaacataaaagagcgcgtttttcccgtaaaatgtggtctttcaaggactgtatcagagaataagacaggctgaggtaggtaataggaagtaggctagatcaaatatttaaaaatagaaaattgggagcaaaatctccatctggggactgattttgatgggaaaatacagttttgccttgattaagataagatctgattgatagaatggtaaaaaattgattgaggagatcttatgaaaaaactagtttcctggtataagaaaaaggataaggaattggaaacccatttctcagccggtctgttgcagatcaattttgtgaccaatgcactgattctattggtcttttacatctatttggtcattagtcagtcgatctatgctctatcggatccattcatccaatttagtgtttgggagatcatttcatttacgatgaagctcttgccctacggtctaaccgtagccctctttgttcccaatatttttgtcattatctatgggatcggtcggtggtccagcatccagttcaaagaagcagaggaagaagctctcaaagatccagaactgattgaggatagagggccagtgaagggcgaagaactgatagaagaggatacattcacaattgaaacatcaagtcctaagcctatcaaaaagaaaaagcaacagcctaccattgtactttggtttggactctttggttgttttctcgaagcgattttcattttcatcgtcaaggatatgaccttttacgaatggaatgagcccttgatcaattctcagaagcatactttgatctggtctggcgcctatccgaccttcttcacactggcagctcttactttactagccttgattatctattcctaccgggatgcgaattcactttctccgctagcgaatgttttctgcatcagtggcattctaggaggagtggttcttctcttagtttttgataatcaactgcaggtagcaagttttcacacctttttcttactgatctattccatccatctcttatggattcgcatcaaggagtggcaggaagatcgaacagagataagctatgagaatcgtctgcttcaatggcttcatcagctacagctgactgggccttctcacagaagatcccccctcagaatctcatcattgatgagcactatctctgtacggttgcggctggtgggcataaaaaagttgtcaagccccagcggatgggcgtccgccacggtcatccggttgttgtcaatcgccagctttgtattgccaatgcatttgaacaggtactagaagaaaagacgccgcgattccatcgcttcttgcgtcgcaattacgaccgctatggctatccctttgctaaacagatcaagaagaaatgggctatggacctgatttactacctaatgaaacccttggaatggctctttttactggttctttatctagttgatcgtaagcctgagaaccgaatcgctatgcaatacatcaagccaattccagaagattttgatcccaagaaagcttcctaagtcaccgatttctacttgacaagcgagaaggagcgcgatataatgagacaaatttaacctttaagaggtccagagaggcctgcaaggaaagacagaaaaaagatcagcggacggtgtctagctgatcatttgtagggccttgcttttgcgaggtcttttttgctgaaagaaagaagaggaaatcaatggtcagtgacagttgtaaaaaacgctttggcaaaatcatgatggaagagatggagctggttgctcaagaggagatcgctccgcggattttttcaatggtcttgaagggggaaatggtggagcagatgctgccaggtcaattccttcatatccgcgtccctgatgggtctaagctccttcgccgtccgatttcgatttctgagattgaccgtaagatacagacgtgtcgcttgatctaccgcatcgaaggtggggggacagcaatcttttcccaattgccaatcggtagcaaactcagtgtcatggggcctcagggaaatggctttgatctcaccaatctcggccaaggtcagaaagccttgatcattggtggcgggatcggtgttcctcctttggtccaagtggccaaacaactccatgagcaaggggtggaagttgaagtggttgtcggctttgcgaccaaagaagccgtcattttggaagaagaactttctcaggttgctcatgtcactgtaacgacagacgatgggacttatggcactaagggctatgtctctacggtcattgatcagatggaccaggagtttgacgctatctattcttgtggagcacctggcatgctcaaatatgtcaataccaaattccatgatcatccccgcgcctacatttctatggaatcgcgtatggcttgtgggatgggtgcttgctatgcctgtgtagtgcatctggaaaatgaaagccaagcagccaataagcgcgtgtgtgaagacggaccggtctttgaaaccggtacgattatgatgtaggaggaccttatgacagcaaatcgactagccgtatccttacctggtttagacttgaaaaaccccatcatcccggcatctggttgttttggtttcggtcaggaatatgccaaatactatgacttagacttgcttggatccatcatgatcaaggcaacaactgctgaggctcgttttggtaatccaacgccacgtgtcgctgagacgcctgccggcatgctcaatgccattgggctccaaaatccaggggtagacgtggtcctggcggaaaaacttccttggttggcccaacattatccagacctaccgattattgccaatgtggctggcttctccaatgaagagtatgcaacggtatctaggaagatctcgcaagcaccaaatgtcaaggccattgagctcaatatctcttgtccaaacgtagaccatgggaacaacggcctcttaatcgggcaggttcctgagttggcctatgcggctgtgaaagcagcggtagaagcgtcctccgtccctgtttatgtcaagttaacgcctagtgtagcagacatcacgcaggtcgcaaaagcagcagaggatgcaggggcgactggtttgaccatgatcaataccttggtcggcatgcgctttgacctcaggactggtaagcccatcattgccaatggaaccggaggcatgtcgggtccagctgttttcccagttgctttgaaactcatccgtcaggttgcccaatccactaaacttccgattatcggtatgggaggtgtcgattcagccgaagcagccattgaaatgatgattgcaggtgcctctgcgattggagttggaaccgctaattttaccgatccttatgcatgtccaaccatcatcgaagatctgccacaggtcatggatcgatacggtattgacacccttgagaacttccgtaaacatgtacgggaaaatctactgtaaatccttgacttttcccaaatatcgtactacaataaataaaaacctttaaagcagtccagagaggctcctaaggtctagacggtgaatcatggtagttgttcctacctaattttcgtgtaaccttgcctcgggcaaggtttttttgtagataaaatgatcaatcaaaaaaggagtaatccatgcgtgaagaacgtcctattatcgcccttgacttcccagctttcgaggatgtcaaaaactttttagagcattttccagaagacgaaaaattatttgtaaaaattggaatggaatttttctatgcagttggtcctgaaattgtacattacctcaaagggcttggacacagtattttccttgatttgaaattgcatgatatcccaaatacagtcaaatcagccatgtccgtactggggaccttcggagtagatatggtgacggtccacgcagccggtggtgtagagatgatgcgcgaagccaaggcagctcttggtgaaggagctaaattagtagccgtgacccagttgacttctactagtgaagaagacatgcgtgattgccaaaacatccaaacaacggtccaagaatctgtagttaattatgctcgcaaggcccaagaagcaggcttggatggcgttgtctgctcagcccatgaagtagccttgatcaaagatgccacttcatcagactttgtctgtgtaacaccagggattcgtcctgctggagctgaaatcggcgaccaaaaacgggttatgactccacaagaagctcataaaattggatctgactatattgtcgttggacgtccaatcatccaagcagaaaacccatgggacgcttaccatgaaattaagagacagtggaatgcgtaagagctactaaaagtgaaacttttgtagctctacgggaagtcctatgggaccttccctaacgcgttcactaacctgtaatgttgttgtttaaatcaaaaaatgatttaattcgtatatgattaaaatcgtaaaaaggagtcgtcatgtcattagctaaagatattgctagccatcttttgaaaattgaagcggtttatttaaaacctgaagaacctttcacttgggcatctgggatcaagtcccctatttatacagataaccgtgtaacccttgcttatcctgaaactcgtaccttgatcgaaaatggatttgtagataaaatcaaggaagctttccctgaagtagaagtgattgcaggtacagcaactgcagggattcctcacggagccattattgcggacaagatgaatttgccatttgcctacatccgtagcaaaccaaaagaccacggtgctggaaaccaaatcgaaggacgtgtaccgcaaggtcaaaagatggtcgtagtggaagatttgatttctactggtggatctgtcttggatgctgtcgcagctgccaagcgtgaaggagcggacgttcttggtgtcgtagctatcttcacctaccaattggagaaagccgataagaaatttgcggaagctggcgttcaacttgaaaccttgtctaactatacagaattgattcatttggcggaagaacaaggttacatcacttctgaaggtttagagttgttgcaccgtttcaaggaaaaccaagaaacttggcaaaataaataataggacggaagcgtttttaacgcttcttttttatactcttttcactagttggtggttaacttgattctcaaagtaaaatccggtatgattgtagtaattgtttatttccctgccagtggtgtaatatcaagtcgggggtgatagataccaaaagacattttcctatgcttattttagggagacttcttctaagtcaagacaaactaatgttttcgatagaacctatgttcttggagcaggtaaaaatctggatttgcggatgatattcctgattgggtctcctatgacagtcttttataatccaagcaagccacagattggttttgtcgaacgatatgccggcttagtcggtttctataaaatcggaatgattctaacggttgggatttatcttgtttttttatgtattctaatcctagtgttttaggttagttaaggttaagagttaaaaattggttggataaaatgaatgtacccataattaccattttacagttgatgttcaccccaaaacagcagaaatgctgtttttttgatataatggacctatgttatcgaaaagtaaacgtattctatttgggatgcttcatgttgtcatgttgctagtggtgttccactggttcttgatcagtgtgacctatctgagagagatttcatggctagccattttaggtgctggattgctatttctgctagcctgtttgaaacgcgatgggctaaagagtgcctttgcttggttgacccggcacaaaaaaggcttcttgcttggtgcccttgtctttcagttgattgtcatggtctgtgcagagctctttatccgtagggatgctgcggttgttttcaaaggggcttttgatcttcttaagcaatcctctatcaccaactacctcagtcgcaatcccaataacattccgctctttctttacgagaagtttttctatgtcttatttggctctagcggtctgtgggtcatgcaggctctcaatatcctctatgtcaatctgggagcagtactcttatataagctatctcagaagcatttcaatcaaaaaatggctgatctagtctatctcttctatgtgagcttgatctgttactcgccgtatttctattccatgtacacggacattccgccacttcctttgatcgctcttcagttatggtggaccttggatctcttaaaggaagatcaagcagtctcctggaagaagatggttagtttgggaatcttatcaggcgtgaccatgttgatccgtccaacgacgattattgtcatgattgccttttgggctgtgcttttcttcagaggaaattggaaggtctttggaaagattgctacggtgacggtcatgacgacgggctttgtctttgcagggttgaatacggcggtcaatcatcaaagagttgtgccaatcttgaaacaagaagggctggctaaaggaccgctcttgtttatcaatctgggcttgacagatatggggcacaatcaagaagatatgaaagagggcttgctagcctatattgatgaggataagcgctcggattacaacaatggcctctttaaaaaagaaaatgtgatcaaagaaatcaagcgccgtctcaaggagtacggaccgttcggtttgatcgggcatatctactacaagcaatccttgacggtagcagaagggaccctaggttggctttaccgagatgtagagtatgagaagacgccttttatcaatcctctctacgcacccctgactaaaaataatggtctggcaaaatgggtgcggacctatttccttagcattgatcgcccgcaatacaagtattatgaatttgtcaagcaggtgatctggatcgtcctatcggctggtttggttggagcttatctcaaacgtcgagatacagatgaatttaacttcctttccttagcggtctttggtggcttactctttttgaccatctttgaaggtgggaagacccgctacctcatccaattcttaccgcaaattttactagtcgcttcgatcggtctagcaggatttactaagaaagaaaatatctaaaagctcttgcttgtttgacaagcagaaacagagagtgggacagaaatcagtaattcgttagaattcgatttcgtcgtcccacctccgcgcagttgagtagggctgtaaaagctgatgaaatcagcgtagtagagcccactcaaccactgcgtcttgctcgacaatccaaaaataattgagaggctaggacttttgtcccagcctcttttttatccagtggatctgcgccaaatgtggtataatgtaaggtaagaatttattggatagcggagagtttccatgcagcattcaccctggcatgaagccatcaaatcccatcttccagaagggtattttcaccagatcaatgactttatgaatgaagtctatagcaaaggagtggtttatccaccgcgtgacaaggtctttaaggccttgcagacgacagagatggatcaggttaaggtcttgatcttaggccaagatccctaccatggaccggatcaagcgcagggcttaagtttttctgttccagatcatgtaccagcgccgccttctttgcaaaatattctcaaagaattgcgctcagatatcggagagaagcgctcccatgatctgacctcctgggcagagcaaggagtgctcttgctcaatgcttgcttgacggtgcctgctggtcaggccaatggccatgcaggacaaatttgggagcctttcacagatgctgtgatcaaggtggtcaatgagttggaggagcctgttgtctttatcctctggggatcttatgcccgtaagaaaaagcctctgattacccacgatcgacatttggtccttgaatcagctcacccaagtcccttatcggcctaccgaggattttttggttcccaacccttttcaaaaaccaatcaatttttgaaagaggcgggacgcgagccgattgattggttaagataggagaaagaaatgccactattagcaacgatttgttacattgacaatgggaaagaatttctcatgttgcatcgcaataaaaagcccaatgatgtccatgaaggtaaatggatcggagttggtggaaaattagaacgcggggaaaccccgcaggagtgtgctgcgcgtgagatttttgaggagacgggccttagagctaagccagtcttgaaagggatcattacctttccagagtttactccagatttggactggtacacctatgtcttcaaggtaacagattttgagggagaactgatcgagtgtaacgaagggaccttggagtgggtaccttatgatcaagtcctctcaaaaccaacctgggaaggggaccacacctttgtcgagtggttgttagaggaaaaacccttcttttcagcaatgtttcgctataacggcgaccgcttgttagagtcgcatgttgatttttatgaataaaggagaatgcaatggttgtcattaaaaatggtcgcgtaatggatcccaaaactggcttggatcaagtctgtgatcttcgaattgaaggaaagaaaattgtagagatcgctgaaaacctcccaacggatggacaagaagtccttgatgctactggtctggttgtagctcctggattgatcgatgtacacgtccatttccgtgagcccggtcaaactcataaagaagacatccatacgggtgccttagccgcagctgcgggtggttttacccgagtggtcatgatggccaataccaatccgaccatttcagatattacgaccttggaggaagtcttagcttctgcagctaaggaaaatcttcacattcatacggttgcgacggtgactaagaactttgacggtcagcacctgacagattttgaaggcctgcttaaggctggtgcagtaggattttcagatgatgggattccccttcaaagcactaaggttgtccgtgaagccttggaagaagctaagcgtctagggacctttattagtctgcatgaagaagatcctgagttgaatggcattcttggtttgaatgaaaacattgccaaggaacacttccatgtctgtggtgcgacgggtgtagccgaatattcaatggctgcgcgtgatgccatgattgcccatgcgacaggtgctcacctccatatccaacacctttccaaggaagaaagtgtcaaggtggtggaatttgcccaaggattaggagctcatgtgacggcagaagtggcacctcaacacttttcgaaaacagaaagtctgctcttgactaaaggaagcaatgctaagatgaatccacctcttcgcttagaatctgaccgtctagcagtgattgaaggcttgaaatcaggcgtcatctcagtaattgcgactgaccacgcgcctcaccatgcagatgagaagaatgttcctgatattaccaaagcaccatctggcatgactgggcttgaaacttcgctttctcttggtttgacctacttggtgcatgctggccatttaagcctgatgcatttgcttgaaaagatgtcctataatccagcacgtctctatgattttgatgctggctatatcgcagtggatggaccggcagatttgaccatctttgatccagaagcagatcgtctggtatcggatcatttcgcttcaaaagcaggcaattcaccatttgtgggtgaaacattaaaaggaaaagttgcttatacgatctgtgatggacaagtgatttttcaaggataagcgatcgtatttatatgaatctaaaaaaaatgatgcaaggcttggttttctttttaaccagccttcttgtctttgtctttctatttcgtgccctgctaccaactgcatcccctcgtatgaccaagcccaaaatggctacgaaagaagtcacctatacttatgtagctctaggagattcactgaccgaaggagtaggggatagcaccaagcaagggggctttgtccccatccttgcccaaagcctgtctaatgaaaatgacggtcagtatcagcctgtcaactatggagtagctggaaatacaagcgctcagatctttgatcgactcaagaagcaaacagatcttcagaaggatctcaaaaaggcgcgtgtcatgaccttaacggttgggggaaatgatctgcgcaaagtcgtcgtcgatcatctgagtgatttttctctatcagatatccaaaaaccgctcaagaattatacagctaacctcaaagaaattattacaaaggccagaaaggacaatccccatcttcccatttatgtagtggggatctacaatcctctttacctgaattttcctgaattaaccagtatccagacggctgtagatcgttggaatgagacgacggaagaaaccatcgcgcaatttgatcaggtctatttcgttccgatcaatgatctgctctataaaggaattgatggcaaaatgggcgtatcagaaatcagtgacgggaagacaaccgttatcaatgatgccctgtatgaagaggatagttttcaccccaacaatacgggctatgaaaagatgaaacaagcaatattggagaaaatcaatgccacgaagaaaacttggagtcaaaaataatcccatcaacgagaaggtccccttccttcaaaaaattaatatttggaaatggttgtttttaggtttggtcagccttctcttagccttcgctttagttgtgcaaggacgcttagcgacgccaagagaagatgttagtcagcttcatcaagcagttggcactaaagatgtcaaagttggaaccatgacaacgactcgtgatcaactcaatgataccatcaaatcgcttctgaaaaaatataagctgtccgactacaaggtctatgcggacaatcagcaaatcctattagaagggcagttgagtctcttagggaaggattatcccttatatatttactttcaaccatccaaattggaaaatgggaacattctcttgacggtgaaggatttttcagttggaacctttcaaattccacaaaggatggtcttgcggctcttgagtaaaaataaaaatatcccaaaatttgttcagatctcacccaagcagtctaccatcaccattgtattgccagaaattgacaatgactttggaatctatgttaaggccaataccattgacctctataatgacaagatcgtttttgatttgtatcagaagaagtagggcggaagaggctattcaaattgaagtcaaagtcatcttaaaaactttccttaggctcaataattccgagtgctagaaacaaccgtgtttctagcacttttctcacagcggaaagtttcattacatgatgtatttgaatgatcctaattgttaatatcattataattttttaataacacctaggttttcttatgtaaaaacaggctgtctatagactaagtagaatcaaaagctttattttgttctattcaaaaaattcagaatattacagaaaattcttgacattgctttttccctatgctaaaatactaaacaagacattgaacaaaggagaaagtcaaacatgaaaacagctaagtttattcaatttgctttgttgttgaggtataagggctagtgcagaagcattagtcctgtttggcttaccaagcgggcaaaaacatctcgcttggttgaccgagtgagatgtttttctttatatccactacatagaaatgaggagaccctatgcgtaaagttgaatttttagataccagccttcgggatggtgaacagactccaggagttaatttctctatcaaagaaaagattgccattgctaaacaattggagaaatggggcatttctgctattgaagcaggttttcctgcagccagtcctgattccttcactgctgttcaagagattgcgaaggtcttaaccaagaccgccgtgaccggtttggcccgttctgtcaaatcagatattgatgcctgctatgaagctttgaaggatgctaagtatccgcaagttcacgtctttatcgcaaccagtccgattcaccgggagtttaaactcaacaagactaaggaagaaatccttgaagccatcaaagagcacgtttcttacgctcgctcaaaatttgaaattgttgaattctcgccagaagatgcgacacggaccgaattggatttcctcttgcaagtcgttcagactgcagtcgatgcaggtgctagctatatcaacattcctgatacagttggtttcacgacaccagcagagtacggagccattttcaaatacttgatcgatcatgtcaagacagatcgcgagattatctattcgcctcattgccatgatgacctaggtatggcggtggctaatagtctcgctgctgttaaaaatggtgcccgtcgtgtcgaaggaaccattaatggaatcggtgaacgggccggcaatgcggcacttgaagaagtagcggtcgctcttaatattcgcgaagactatttccaagtggaaagtccgattgtcctaaatgaaaccatcaacacttctgagttggtttctcgttactctggtattccaattcctaaaaacaaggcggttgttggtggcaatgccttctcacacgagtctgggattcaccaagatggggtccttaaaaatccacttacttatgaaatcatcacacctgagttggtgggtgttaagagcaacagccttccgcttggtaaattgtctggtcgccatgcctttgtcgaaaaactgcatgagttgggactggatttcacagaagaagatatcaagccattgtttgcgaagttcaaatctctggcagacaagaaacacgagatcactgatgccgatatccgcgcccttgttgccggtacagcagtggaaaatccagaaggattccaatttaacgatctccgcttgacaaccaatgcagacgaaacgattacagcagcggttagcctcagcaatgaagaaggggaagtacttgagttcattgccaatggtcaagggtcggttgaagccatctttaatgcgattgataaattcttcaaccaaaccgttcgcttgacatcttataatatcgatgcagtgactgatgggatcgatgcccaagcccgtgtcttggtatccgtggaaaatgtcgatacagatacgattttcaatgcttctggtttggacttcgacgtattgaaagcctctgccatcgcttatatcaatgccaacacgctggttcaaaaagagaatgcgggtgagatgggacgagctgtctcctaccgtgatcttccacaagcctaagaggaaatgaacatgacaaagaaaattgtaacacttgcaggagatgggattggccctgagatcatggtcgctggactagaggttcttgcagccgttgctcccaaaatcggctttgattatagtttagaagacaaaccttttgggggtgctgggattgatgcagctggccacccacttccccaagatactctaaaagcagctaaaggagcggatgctattcttctcgcagctatcgggagtcctgagtatgacaatgctcctgttcgtccagaacaaggcctgctcgctattcgcaaggaattaaatctctttgccaatattcgtcctgtacggatttttgacgccttgaaacacttgtctcctttgaagccagagcgtatcgagggtgtcgacttcgtggtcgtgcgtgaattgacaggtgggatttattttggagagcatatcttgaaagaagatacagcgcgcgatatcaatgattacagtgcagaagaaatccgtcggattatgcgccaagccttcaagatcgcgcaaggacgtggcaagaaagtcaccagtatcgataagcaaaatgttctggcaacttctaaattatggcgccaagtggcagaagaagttgccaaagaatttccagatgtgaccttagagcaccagcttgtcgatagtgcggccatgatcatgattaccaatccagcccgctttgatgttatagtgacagaaaatctatttggagatatcttatctgacgaatccagcgttcttcctggaacactaggcgtgatgccgtctgccagtcattctgaccaaggaccaagtatgtacgaaccgattcatggttcagcacctgatattgctggtcaaggcattgccaatccgatttccatgatcctgtccgttgccatgatgctccgagacagttttggagaaacatcaggtgcagaaatgatcgaagaagccgtcaatcaaaccttgaatcaaggaatcttaacacgggatctaggtggtcaggcttcgactgcagagatgactgcagccattattgggaatctctaagatgacttggagagatcgctgtttagttcttattgctatttggaatagtatcgtatttctgacctatggtttagataaacgaaaagctatccaaagcaggtggcggattcctgaaaaggtcctgttactcgagagctggctgcttggtggattcggagctctactaggtggatatctctttcaccacaaggtgcggaaatggtattttcaagctatttggtggggcagtagccttcttttagcaggtgccctctttctaatccttcaatggatttcctaacaagaagataaatggagaaagacgatgagtggaaaatctatctttgataaactttgggaccgccacgtgattacaggagtggaagggcaaccccaactcatgtatgtggaccaacactatatccacgaagtgacgagtccgcaagcctttcaaggattacgggatgcaggacgcaaggtccgacgacctgatttaacctttggcacctttgatcataatgttccaacggtcaatatttttgatattcgagatgtgatttcaaaagcccagattgataaattagctgagaatgtggtggactttgggattgatcatgctgcccatggtactgctaagcaaggaatcgttcatatggtgggccctgaaaccggtcggacccagcctggaaaatttattgtctgtggagacagccataccgcaactcacggagcctttggtgccattgcctttgggattggaaccagtgaagtggagcatgtctttgccacccaaaccatctggcaagtcaaaccaaagaagatgttggtcgaattcaccggaaccccacaaaaagggatctattcaaaggattacatcctagctttgattgcgcgctacggtgttgcttgcggagttggctatgtcgtagagtatcgaggagaagcgattgatcgcttgaccatggaagaacgcatgaccatctgtaacatgtctatcgagtttgggtccaaaatggggatcatgaatccagatgagacgacctttgactacctccggggacgcgaatgtgtgccagatgattttgaggccgcagtagctgattggaagactctggttagtgatgacgatgctgtttatgataaggtcatccgtttggatgtatctgatcttgctccaatggtgacttgggggaccaatccttctatgggagtggactttgagactccttttccggagattcgcgatatgaatgatgaacgggcttatcattatatggatctagaacctggccaaaaaccagcagacattgaattaggctatatctttatcggttcttgtacaaatgcgcgtctcagcgatttggagttggcagccaagtttgtgaaaggcaaaaaaattgcgcccaacttaactgctattgtggtacctggctctcgtccagttaagcaagctgccgaaaaattaggcttagacaagatcttcatggatgcgggctttgaatggcgtgatccaggatgctccatgtgtctaggaatgaacccagacaaggttccagatggggtccactgtgcctctactagcaaccggaacttcgaagaccgccaaggatttggggctaagacccatctctgtagcccagcaatggccgctgcagcagcaatcgctggtcgctttgtcgatgtgcgccaaatgccagaagtcgagtaaaaggaggaagcatggagaaatttaccatttatacaggaacaacggttcctttgatgaacgataatattgataccgaccaaatcctcccaaagcaattcttaaagttgattgataaaaaaggttttgggaaatacctcatgtatgcttggcgctatttggatgaccaatatactgaggatccagattttatctttaacaagccagaataccgcaaggcaaccattttgatcactggtgacaattttggggctgggtcctctcgggagcacgcagcctgggctttagctgattatggctttaaagtcgttatcgccggatcgttcggagatatccattacaataatgagctcaataatggcatgctgccgattgtccagccactagaggttcgtcaacaattggcaagtttgaagccgacagatccagtgacggtagatttggaagagcagaagattctctcgcctgttggagagtttcgctttgagatcgatcaagattggaagcacaaattgctcaacggcttggatgatatcgggattacacttcagtatgaagacttgatcgcagcttatgagaagaaccggccagcttactggcaatgataaaattgtatacttaattacgaattttctgaaaatatattgaatttgagactgttttttggtacaatactaaaaagaatagaaaaggaaagagacttatgacaaaacacattcaatgggacggacaactttcacaagaaggatttgatattcttaaaggagagggtggctgtatcgtctgccctaccaaagttggctacatcatcatgaccagtgataaggctggcttggaacggaagttcgaagccaaagaacgcaaccgcaacaaaccaggtgtggttctttgcggaagcatggatgaacttcgtgcccttgcgcaattgaatcctgaaatcgaagccttctaccaaaaacattgggatgaagatatcttgcttggttgtatccttccttggcgtgaagatgcctatgcaaaattgcaggctttcggagatggacgtgaagaactcatgacagacgttcgtggaaccagctgttttgtcatcaaatttggtaaagctggtgagcaaattgccaaagaaatgtgggaaaaagaaggcaagatggtttacgcttcttcagccaacccttccggtaaaggaaaccgcgggaaggtcgaaggaattggtgagcgcatcgaaggtgccgtggacttggtcatcgaagcagatgattatgtagcttctatccaaccagacaagaccattgaaactcgctatgaacaaggcgtgatggtctctatggttgatgcggaaggaaaattgatcccagaacaaggagcaggtagccgttctgtcaatacttgtccagttgtgatccgtaaaggattggatattgataagatcatgatgcacttatctgatcattttaactcttggaactaccgccaaggggaatactattaagaaacagaaaacagcattccatttgggatgctgtttttgtgaaaggataaaagatggtatcatagagttaaacgatgttccgaacagggaagaagcagagacttgtagcccaatcaaaaaaactagagtatgcgctctagttttttggttgttgatgggtgatgttctttccccaagggatgagattttcttttttctctttgatccgttggatattgtccttgtgacgaagaatgatcaaggtcgctaaggccaagacaatgactgtaaaaagaggatcatagctgtgcaagatccatccagtcaaaggaagaaggaggaccgataaaatggcgagtagcgcaacagtaacactcgaaaacgaaatcatactggttaaatacaggctagctacaaaataaacagctaaaatgagtagcaggataggcgagaaaccaagtaagacaccagcactcgttgccactgcttttccacccttgaatccagcaaaaactgggaaagtgtgccccaatacagctaagagaccaaagaccatcggcgagatcccctgaattccaaagaaagtcggaaggaggacggccagtgtccctttcaagaaatcaatcgcaaagacaatgatcccagctttttttcctaagatccggaaggtattggtcgttcctgtattgcctgatccatgttctcgtaaattaatattaaaaaagactttcccaatccataatcccgaaggaatagagcccaacagataggctaagattaaaacacttatttcttttatcatactctcattatatcaaaaagccatcgatagaaaaagcaatttctggagttcaagtgtgacatctgaagaaagtgtccagccaacattttgtactgggatgtagaaatctccatatagagagaaaaaattttgcaaaatttcctaaaaaactgtaatatagaaaagatgaacaaacaggaggttccttgtggcaaaaaaggaaatcaatattaataattataatgacgatgccattcaggtactagaagggttggatgcagtccgtaaacgtccagggatgtatatcggatcgaccgacggaaatggcttgcatcacatggtctgggagatcgtggataatgcggtcgatgaagccttgtctggctttggctcacaaatcgatgtaacgattaataaagatggttctctatcggtagaagaccagggacgtggaatgccgaccgggatgcatgctatgggtaaaccaaccgttgaggtgatctttacggtcctccacgccggagggaagtttggtcaaggaggctataagacatctggaggtcttcacggagtgggatcttctgtcgtcaatgccctttctagctggctagaggtagaaattactcgtgatggagctgtctacaagcaacgttttgaagatgggggaaaaccagttacgacccttgaaaagatcggctccgctcccaagtcaaagacagggaccaaggtcaccttcatgccagatccaaccatcttttcaacgacggatttcaaatttaataccattgctgagcggatcaaagaatcagccttcttgcttaaggacgtgacgctgacgctgaccgatctccgtaaggaagaagacaaccatgtggcctttcattatgaaaatggtgtccaagatttcgtagagtacttgaacgaggacaaggaaactttgacaccggttctctactttagtggcgaatcagatggttttcaggtagaagtggccatgcaatacaatgatggttactctgataatatcttgtctttcgtcaataatgtccgcaccaaagatgggggaacccacgagacgggtctgaagacagccattaccaaggctatgaatgactatgcaagaaagacgggtcttctcaaagaaaaagacaagaatctggaaggatcagactaccgcgaaggtttgtctgctgttctttcgatcttagttccagaagcccatttgcagtttgaaggacaaaccaaagacaaattaggaagtcccttggctcgtccagttgtcgatagcattgtttctgataaattgaccttcttcctcatggaaaatggggagttggcttctaatctgattcgtaaggctattaaagcccgggatgcgcgtgaagccgctcgaaaagcgcgggatgaaagtcgaaatggcaagaagagcaaaaaggacaagggacttttgtctggtaaattgacacctgcccagtctaaaaatcctaagaaaaacgaactctatctagtcgaaggagactcagccggcggttctgccaaacaaggacgggaccggaagttccaagcgattcttccacttcgtgggaaggtgcttaatactgagaaggccaatatgagtgatatcctcaaaaacgaggaaatcaacaccatgatctacaccatcggtgctggagttggggcagatttttctgtggaagacgccaactacgataagatcattatcatgaccgacgctgatacggatggtgcccacattcaaaccctcctcttaaccttcttttatcgctatatgcgccctttggtagaagcaggtcatgtctacattgcacttcctcctctttataagatgtcgaaaggcaaaggcaagaaagaagaagtagcctatgcttggacagatagcgaattagaagagttgcgtcggacctttggccgtggagcaacccttcaacgttacaaagggttgggggaaatgaatgcggatcagctttgggaaaccaccatgaatccagaaactcgtaccttgatccgtgtcaccattgatgatctagcgcgtgcagaacgccgtgtctcagtcctcatgggtgataaggcagcccctcgtcgccaatggattgaagataacgttaagtttaccttagaagaaaatacagtattttaatcactttctactataaaataaataagctgggatgtagaaatggtaaggaattgacatgagaactgatacagaaatgatgaatctgattttgcaaatagctgatactctggaagtagaagcgattgctttatccggatcccgaacgaatcctcaggcaaccaaagacgagtttcaagattacgatgtagtctatatagttgatgatctggaagaactgatttcagatttatcctggttggatcagttcggaaatcgactcatcgaacagcacaaccgacttggacaccgtcgtctgtatctcatgctctttgaagatgggaatcgtattgatttaaccctctgccccaaggagtatatccaagagtgggtggatagcgaggctggtttcaaagtcttaaaagatgacaaaggtttgtttgactcttacattcctagtccgaagcgctattggaccgctccgcctactgaagaggaatttgcagcatcctgcaatgaattttggtgggtatcggcttatgttgtcaaggccattcgaagaaatcagcttatctatgcgaccgatcacctctatggcatttgtcagcaagaacttctcaaggtcttagcttggcaggtgacaagcgataagggagtagttgacatcggaaagaactacaagtacctcttccagtaccttccagctgagcaagagaaggagttctcagctttacttgatttatctagtttcgataaaatcactcagtctttattttctaccatgaagggattcgatcgagaagctcaatttctggcccaaaagatgggatttgcttacgataaggaactagcagagaaaatgacttcttatgctaaagagaaactttctaatcattaatttaatctatttaaaactacagaaaggatcctttggttacttggtgtgactgaattcctttttctaaaaaatctactcaacattctttgaatggagttgaacacgccctaagtgctgtgtgaaactcttgatccatcatttaataacgtatttaaaactacagaaaggatagtttagttacttgtagtaactgaacacgggactaatttcctaggaaaaaagataaatcgattcgggttcatcgaaacctgcatcgatttcctcgtttttctacagccgttaccaattcgaaaaattacggatgtggatgccctagggtactacagaaattttcggcaagccgaatcgtccctttgtatcttatatgagtaatattcaaaatatgtccctggaggacatcatgggggagcgctttggtcgctactccaaatacattattcaagagcgggctcttcctgatattcgggatggcttgaaacctgttcaacggcggatcctttattctatgaacaaggatggcaatacccatgacaagggctaccgcaagtcggccaagtccgtcggaaatatcatggggaatttccaccctcacggggatagttcgatctatgatgccatggtccgcatgtctcaagactggaagaatcgtgaaattcttgttgagatgcacggtaacaatggttctatggacggtgatccaccggctgccatgcgttatacggaagcacgtctatctgaaattgctggttatctccttcaagatatcgaaaagaacacagtgccatttgcctggaactttgacgatacagaaaaagagccaactgttttgcctgcagcctttccaaacctcttggtcaatggagccacgggtatttctgctggttatgcgacagatatcccgccccataaccttgctgaagtcatcgatgcggtggtctatatgatcgaccatccatctgccaaggtagacaaactcatggagtttcttcctggacctgatttcccgaccggtgccattatccaagggcgcgatgagatcaagaaagcctatgaaactggtaagggacgggtggttgtccgctctaagacagaaatcgagcaactcaaaggcggcaagcaacaaatcgtcgttaccgaaattccttatgagatcaacaaggcagtcttggtcaagaagatcgacgatgtccgtgttaacaacaaggtggccggtattgcggaagtccgggatgagtctgaccgagatggtcttcgtattgccattgagctgaagaaagatgccaatgcagacttgatcttgaactacttgttcaagtatacagatttgcaggtcaactacaacttcaatatggtggcgattgacaactatacccctcgtcaagtggggattgtgccgattctctctagctacattgctcaccgtcgggatatcattgtcgctcgctcgcgctttgataaggaaaaggcggaacgacgcctccacattgtagagggattgatccgcgtcatttccatcctcgatgaagtgattgccttgattcgtgcttctgaaaacaagtcagatgccaaggaaaacctcaaggtcagctacgatttcacagaagagcaagcagaagccattgtcaccttgcaattgtaccgtttgaccaatacagatatcgtcaccttggaagaagagcatgctaacctcaaggagcaaatcgcgaccttggctgctatcataggggatgaacggaccatgttcaatctcatgaagaaggaattgcgtgaagtcaagaagctctttggcaatccgcgtcgtagtgagctacaagacacggctaaaacgatcgagattgatacagccagtctcattgttgaagaggaaaccttcgtcagcgtaacccgtgctggttatatcaaacgaacctctcctcgttctttcaatgcatctacagtggaagaagtcggtaagcgggacgacgatgaattgattttcgtagagcctgctaagacgacccagcatcttttactctttaccaacttggggaatgccatttatcgaccaattcatgaattgacagatactaagtggaaggatattggagagcacttgagtcaaactttgaccaatttcgagcaagaggaagaaattctctttgcggagattgtggatcagtttgagggtgtgacctattttgcagcaactcaacaaggacaaatcaagcgttttgaacgcaaagaattgagcccatggcggacttatcgttctaaatcgaccaagtacgctaagctaaaagaccaagatgaccgtattgtagcagttgcgccagttgtccttgacgacatcatgatcattactaaaaatgggtacgggttgcgcttcaatattgaagaggtccctgtcgtaggagccaaagcagcaggggtcaaagccattaacctcaaagacggagatcaagttgctgccgcctttaagtcgacaactccaagcatgtacattctgactcaacgaggcagtctcaaacggatgttacaagacgatattcctgtgaccagtcgggctaaacggggactgcaggtcttgcgtgagttgaaaaataaaccacatcgcgtcttcaaggcaggtccagtcttcactgaccagggagattttgatctctttacgagccaagaagaagtggcagaacaagatcaaatccttcagatcacttccacaacaggtcaggtgacagaagttgatttgacacaattaagcatttctgaaagaacaagcaatggatcctttgtcaacgataccatttcggatcaagaagttttttcagctactatcaaataaaagaaagcgtcggtccattctaggactgactttctttgaaaataaattttctgaaaattgaaaatttcgcttgaaattctcatgaaatggtgtacaatagtgtacatagattgagaaactgaatcgacctgcatcagatcgacaaggaatagaaagaattaaaaggagcactatcatgacagtatcacttgattgggaaaaccttggcttttcatatatgaaattaccttatcgctatttggcacattatcgcaatggagcttgggaaaaaggggaattgacagaagatgcgactttgcatttgtccgaatcttctccaagtttgcattacggtcagcaagcctttgaagggttgaaagcctaccgtacaaaagatggaagcatccaattgttccgtccagatcaaaacgctaaacgtttgcaacgcacggctgatcggttgctgatgcctcaagttccaacggatatgtttgtggaagcttgtaaagcagtagttcgtgccaatgaagagtacgttccaccatatggtactggtgcaacactttaccttcgtcctcttttgatcggtgttggagatattattggtgtaaaacctgcagatgagtatatctttaccatctttgccatgcctgtcggtaactactttaaaggtggtttggtcccaacgaacttcttgattcaagatgagtatgatcgtgctgcaccacatggtactggagctgcaaaagttggtgggaactatgcagctagtatgttgccaggtaagattgcgcatgatcgtaacttctctgacgtgatttaccttgatccagcgacgcacaccaagattgaagaagttggttctgcaaacttctttggaatcactgctaataacgaatttgtgacgccgttgagtccttctattttgccatcgatcaccaagtactctttgctttacttggcagaacaccgtcttggtatgacaccaattgaaggggatgtctttatcaatgatttggatcgcttcgtagaagcaggagcttgtggtaccgcagctgtaatctctccaatcggaggtgttcaacacggggatgacttccatgtcttctattctgaaacagaagtaggtcctatcacacggaagctttatgacgagttgaccggtatccaatttggtgatgtcgaagcgccagaaggatggattgtcaaagtcgattaaaacgaaggagtctgagccaaaagtgtccaagcttcaatgagaaacagccttaacgaaggacgtagtagctaatgttactctttattcgcttttaggaatagaagggtgacgaatgactcttgcgggggtgggataaagaaggaatttctaactaaattctttctgacccactcccttttctcttgcgtcatcaagagaatttttgtaaaatagaaaaagtgaaaagagggttgaaatgagtaaaaaagataagaaaattgagattcaaatcgttgatagtaaagtaaccgtcggaaaagacacttttgatggtttcactttgtccattggcaagaaaacgattggtgaaattgcagacatggctggtcaatttgccattatcaaaaatggaaatgtggattctctttacaaaaaacttgaaaaagccgttgaaattttaatagaaaattataatttgaataaataagggcttgcaatcatagtaaatcaatggtataatagatcctgttgatttatatggagagatagcgaagaggctaaacgcggcggactgtaaatccgctccttcgggttcgggggttcgaatccctctctctccattagcgttcattgcgacgatgataaagtgactaatgtcagcgctctttttggggtatagccaagcggtaaggcaagggactttgactccctcatgcgttggttcgaatccagctaccccagttcttaggtaatatcagataagtgataaaatatctatccaggtattttatttctttataggatgagtcgttaaagattgtagttgatctcattgcgagtgcttgcttaggaaaaataattataagtatgtcaagttttagaaaacttgattgttggaggattttttagatgaatgaatttgaagatttgctaaacagtgttagccaagttgaaccaggtgacgttgttactgctgaagtattgacagttgacgcgaaccaagctaacgttgcaatctctggaactggtgtcgaaggtgtcttgactcttcgcgaattgacaaacgatcgtgatgctgacatcaacgacttggtaaaaccaggtgaaacacttgaattgcttgttcttcgtcaagtagttggtaaagatactgatacagtaacttaccttgtatctaaaaaacgtttggaagctcgcaaagcatgggacaaattggtcggacgtgaagaagaagttgttactgttaaaggaactcgcgctgttaagggcggactttcagtagaatttgaaggacttcgtggatttattccagcttcaatgcttgatactcgttttgtacgtaacactgaacgtttcgtaggtcaagaatttgatgctaaaatcaaagaagtagatccaaaagaaaaccgctttatcctttcacgtcgtgaagttgttgaagctgcgtcagctgcagcacgcgcagaagtatttggtaaattgaacgttggtgatatcgtaactggtaaagttgcacgtatcacaagcttcggtgctttcatcgaccttggtggtgttgatggattggttcacttgacagaattgtcacacgaacgcaacgtatcacctaaatcagttgtaactgttggtgaagaaatccaagtgaaagttcttgacttgaacgaagaagaaggtcgtgtatcactttcattgaaagctacaacacctggaccttgggatggcgtagaacaaaaattggctgctggtgatgtgatcgaaggaactgttaaacgtttgactgactttggtgcattcgtggaagtattgccaggtatcgacggacttgtacacatctcacaaatttcacacaaacgtgttgaaaatccaaaagatgttcttaaagttggacaagaagtaactgttaaagttcttgaagtaaatgctgcagatgaacgtgtatcactttctatcaaagctcttgaagaacgtccagctcaagaagaaggcgaaaaacaagaaaaacgtcaatctcgcccacgtcgtccaaaacaagaaaaacgcgactttgatcttccagaaactcaaactggattctcaatggctgacttgtttggcgatatcgaattgtaatattcaaaaagcttacctctcggtaagctttttttacttgtaaaatccttgagaatttgatatactataacagttgccacccttagtgtaatggatatcacgtaagattccggttcttgagatgggggttcgattccctcagggtggatgattcataacgaggctcctcggagtcttttttgctctttcttggaggaacatgcaatgacagtaaaattaatcgcccataccttgattgagaaagacgggaagtatctgcttatcaaacgctcgaaaataaagcgaggtctccctaatgtctatccatcttattgggatattccaggtggaagtgtagaagagaatgaattgcccagagaggctgctctacgtgaggctatggaggaggttaatcaaaagcttcggattaataagattatccacgaagatagtcaatttgatgccagcaaagatactgtctttacacgcctagtttatgctggcgagattttggaagagcgtgattttatattagatccagaagagcatacagactttaaatggatttcttctttgaaagacatagagagcaatctcgttgtgccttatttgcttgaaatccttgctgacaaatccaaataaagcagctaaaaaacatcccctttttaataaggagatgtttttttcttagtttttagaagcttcttggaattcagggtttttccatgcttcatcaatgattgcttgcaattcatcagcagaagctttcattttttgttgttccgcatcgttcaatgggatgttcactggacgtacaataccgtgtgcacctacgatggcaggttgaccgataaagacgttgctaacaccatattgaccttcttggaatacagaaagtggaagtactgcattttcatcatcaaggattgctttagtgatacgagcaagggcaacagcgataccgtagtatgtagcaccttttttgttgatgatggtgtaagcagcatcacgaacaccttcgaacaattcgatcaattcagtttcttgaacgttttgagtgtctttaaggaattcttcaaggtttacaccagcgatgttagcgtgtgaccatacagcgaattctgagtctccatgttcacccatgatgtaggcgtgcactgaacgagcatcaacgtccaatttttcagcaagtgcttgacggaaacgagctgagtcaagagaagtaccagaaccgataacgcgttctttagggaatcctgagaatttccatgtagagtatgtcaaaacgtcaactgggttagcagctacaaggaagataccgttaaatcctgattcaataacttgtgttacgattgatttgttaatggcaaggtttttaccaacaagatcaaggcgagtttcacctggtttttgaggagcacctgcagtaattacaacaaggtcagcatccgcacagtcagcgtactcagccgcatagatcttcttaggtgaagtgaaggcaagggcgtggctaaggtcaagcgcatctccgacagctttttcgtgcaattgaggaatttcgataattccaagctcttgtgcaattccttggttgacaagtgcaaatgcataagatgaacctacggcaccgtcaccgacaaggataacttttttgtgttgtttagtcaaatccatgagtctaaacgtctccttcatttttttttgagatagattctcatacgacttcattctaccacttttgaaagtctttgtcatctgaaacagtatgaatccttgatgtaaacgtttttacgtttgtgttcctaagaagaaaaataggctaaaatgtgttataatagtatggtgaattaagtaaagagaggcattttttgaatgcaggataataatctaattgatgtgaatttaacatcagaaatgaagacgagttttatcgattatgcgatgagtgttatcgtagctcgtgccctacctgatgttcgggatggtttaaaacccgttcaccgtcgtattttgtatggtatgaatgaattgggtgttacgccagataaaccacataagaagtcagcccgtatcacaggggatgttatgggtaaataccacccacacggggactcctcaatttatgaagccatggttcggatggcgcaatggtggagctatcgctatatgctagtggacggccatgggaactttggttctatggacggagatggggccgctgcacaacggtatacagaagcccgtatgagcaagatcgcacttgagatgttgcgggatatcaataagaatacagttgattttgcagataactatgatgccagtgagcgggagcccatggtgctaccagcacgcttccctaaccttcttgtgaatggagctacagggattgctgtaggtatggctaccaatattccacctcataatctcggtgaaacaatagatgccgtcaaattgatgatggacaatcctgaagtgaccacccgcgaacttatggaagttcttccaggtccagattttccgacaggtgctctcgttatggggaaatcaggtatccacaaagcctatgaaacaggaaaaggatcgatcgtccttcgctctcgtacagagattgaagtgaccaagagtggtcgtgagcggattgttgttactgaatttccttatatggtcaacaaaaccaaggttcacgaacatatcgttcgcttggtgcaagaaaaacggatcgaagggattacagctgtacgtgatgagtctaaccgtgaaggggttcgatttgtgatcgaggtccgtagggatgcttcggctaatgtcattttgaacaacctctttaagatgacgcaaatgcaaaccaactttggcttcaatatgttggcgattcaaaacggtgttccaaagatcctttctcttcgtcaaattttaggtgcgtatatcgagcatcaaacagatgtggtgactcgacggactatctttgataaagaaaaagctgaagctcgtgcccatattttagaaggcttgctcattgccttggatcacatcgatgaagtgatccggattattcgcaatagccagacagacgctgaagcacaagctgaattgatggctaaattcaagctttctgaacgtcaaagtcaagccattttggacatgcgtcttcgtcgtttgaccggtttggaacgagacaagatccaaagtgaatacgatgatttggttgccctgattgctgatttggctgatattttggctaaaccagaacgtgtggctaccatcatcaaggaagaattggaagaagtcaaacgcaagtttggcgatgctcgtcgaactgagttgatggttggagaagtcctttctcttgaagatgaggacttgattgaagaaacagatgtcttgatcaccctttctaacaaaggctacatcaaacgtctggaccaagcggaatttacggctcaaaagcgtggtggacgtggcgttcaaggaaccggtgtcaaagatgatgactttgtccgtgaactggtctctacgagcacccatgatcatttgctcttctttaccaataaggggcgtgtctatcgtctgaaaggttatgagattccagaatatggtcggacagctaaaggattaccaatcgtcaacctcttaaaattggacgaaggtgaatcgattcaaaccattattaatgtggagcaagatcgcagtgacgaagcctatctcttctttacgacgcgacaaggtttggtcaagcggaccaatgtagctgaattttcaaatatccgtcagaatggtctcaaagctctgaatctgcgtgatgaggatgaattgatcaatgtcttccttacagacggtaatactgacgttgttattggtaccaagtatggttattctgtccgctttaatgaggctgtagtccgcaatatgggacgttctgccacaggtgtacgtggtgtgaatctccgtgaaggagacaaggttgttggggccagtgtcgttacggatcaagatgaagtattgatcatcactgaaaaagggtatggtaagcgtacaatggctagcgaatacccaaccaaaggccgtggcggtaaaggaatcaagacagccaatattacagagaaaaatggtcccttagctggtcttttaaccgttaaaggggatgaagatctgatgatcattaccgataccggagttatgatccggacaggtgtggctaacatttctcaaacgggtcgttcaactcagggtgtgaaagtcatgaggttggatcaggatgcgaaaattgtgacctttacaactgtccagcccgatgaaaaagatgaagaagtagtggaagaaaacgaatagataaggggacagcatgtcacgcaaaagaaaaaagaaaaagagtttacgcaatactcttatcaacatcgttgcaacacttttgattattctctcgcttctcttgattttcaatgctccgatccgtaatatgattatggtttggcataccaaccaataccaggttagcaaggtcgataaaaaaaccattgacaagaataaagaagtgaagacgagctttgatttccaacatgttcagtcactctcgacggaagccgtcatcaatgcccaatggcaagctcaaaagctaccagtaattgggggaatttcgattcctgaattaaacatgaaccttccgatctttaaggggcttgaaaatgtagccctctactacggagcagggaccatgaaggaaaaccaagtcatggggcaaggcaattattctcttgctagtcatcatgtatttggcctaactggagcaaatgccatgttattctcaccattagagaaagccaaggcgggaatgaagatctacatcacggacaaagaaaaaatctatacttatgtcatctcgtctgttgagacagtgactccagaccgtgtagatgtgattcaagatcgtgaaggcgttaatgagatcaccttggtgacctgtgaggatgctgcagcgacttaccgaacgattgtaaaaggaaatttggaaacatctgttgactatgacaaggctccaaaagacatcctggactcattcagtaagtcttataatcaaatgcaactttaagaaaataaagcccaaggcagagatgccggggctttttctatgtaggaagcgaagctaggagaaattcttgtaaaattgtaagagattggtaatataatgtaaggaacttgtcataatattgagggaaaatcagtatataatagatgagaaagagtatgataaggaggtagaatagtgacgaaagagcgaatttatcatctcttgcatcatttctacaatctcttagtaaatgattttccacgaaatggtttaattacgaaaggaatttacgaagtagagcaagtctaccaagctttagaggccattcctcagagtcaggagtacttgatccgctgtgaaattcaacagtttttaaaggagcttgaacaagttcaaacaggttaccagatccgctttaataaagatgaagtcttagtgttagatgatttgaagcaagaaatcgcctataaataatgaaaggtcgtcattttctccatttattacgaattaataagtgaggaggaaattatgtacgacatatcatttattgaaccatctttgcttcctagggaacgcctggtttctgaaggagtggataagctgagtcatcaagaattattatccattctcttacggacaggcaataagcaaaaaagcgtttatgagattgcacaaggtcttttgagctcggttaatagtttaaaggagttaagtcaattaactctagaggagctacaggaaatctctggcattggccgggtgaaggccatcgaacttcaggctgtgattgagtttggacgaaggattcataaagatgaattaatgagttctgaacagatcatgagcagccagaaattggcccataaaattcaacaggaaatcggccataagaaacaggagcacctagttgccctctatttaaatacgcagaatgaaattattcatcaacagaccatttttattggaaccgtgaatcgaagtattgcggagccgcgtgaaattctgcattatgcattgaagcacatggcaacctccattatcttggctcataatcatccatctggtgccgtgtttcccagtaaaaatgatgatgaagtaactcatcgagtcttagaggcctgtgaagtgatgggcttaaccctattagatcacttgattgtatctgaagaaaactattatagttatcgtgaagaaaccgattatttggtataaaaaagagagtgggacagaaatcggtaattcgttagaattcgatttcgtcgtcccacctccgcacagttgagtagggctgtaaaagctgatgaaatcagcgtagtagagcccactcaaccactgcgtcttgctcgacaatccaaaaataattgagaggctaggacttttgtcccagcctcttttcttgttaaagtataagtctttattcttcgttttttctcatgaaataaaggagtgtttgcaattcactggtgagatcgacatattggacgacgacatctttagggactgtcagatgcactggtgagaagctgagaattcccttgaccccagcgtctaccaaaaggctagccacttcttgagccttgacgcttggaacagtcaggatggctgtttgaatgccttcttgtttgagcttttctttaatagaggaaataccgtaaataggaattccgtccttacttttagtattaatcagttcatgatcgtctagatcaaacgccataacaattttcatcttattgcgttcatggaagcgataattgaggagcgcacttcccatatttccgatccccacaatagcgacattggtaatggcattgtcatttaagagatctgcaaagaagttcatcagtttttttacgtcataaccaaatccccgtcttcctaattcaccaaaatatgagaaatctcggcgaacagtagcagagtcaatcccaattgcatcagcaatttgcttggaattggcgcgctctattttttcagagttaaagcgtttaaaaatgcggtagtagagcgataagcgttttgctgttgcgcgtggaattggagtatttttatcatgtttcacaatatcacaacctttccctcttattgtataggaagattgtgaaaaaatcaactatctagagtggtttttaaaaaatatttttgtctaaagaaaaagctgatggcaatggagagttccatcagcatcagcttagttttcagcttgttctacctttttcaaaaaagcatagagtccgtcgactcgccctgtataggggagcttttcccccttgtattcaatggatacgattgagtaagagtcaggcaaggttacacagcctgaaaatgctaggatgcaggctgcaaggtcggtataagtagtcgttcgttttacttggtaagcatcgatataagttagggttaccatattagacctctgttttgttgaaaatttctctttcgacaagactatccattaggaaataaaatttttgttggataatatcattttctggatttttaaagatattaaccagacgaagtccagacttgtctgtaatattgattttaaaacctgtgagatctttgttgaagataattttaagcaagaagccttcaccgctatttggaacagcttcgagcaaacgatttaactcgtaatttccaacttttgtaacagcaaatgtattgtcacgtaaggtatatttttttacatttgggtgtagactataggtatatttgcagtctttcaatgaaacacttgtttcaaaagccattttgttctcctatgataaaatttctttaagttttgagaggaagtctcgaacctcctctacggtattgagttctgaaaaactaattcgaagggattcttttaggcgcgagctatcttttccatagagtgcctctaggacatggctgggttgaactgtaccagcggtacaagcagagcctgtagagacagatatcccagccagatccagtctcatcagcaagacatcattttggacgtctgggaagccaatattccaaacgaagggaagatgatcgtcactcgcatttacgtagaagtcgtagtctgctaaaccattaactagttcttgaccgagtttttgaacttgctggaaattttcttcttgatgaagtgtggcttgctgtagcgcagtcgccatccctacaattgaaatgagattttccgtgctggccctcatcttattttcctgatcgccaccatggatgagattatcaaagtctgggacagctgcataaaggaaaccgactcccttggggccatggaatttgtgggcagaagcactgagaaaatcaatccctaactcttcgggatagacagggactttcccaactgcttggacagcatcaacatgaaaggcagctggatgatcttttaagaattctccgatttctataatcggtagaagatcgcctgtctcgttattggcaaacatggtagagacaagaatggtatccggtctaagtgcagccttgatatcactagcctgaatgcgtccctctcttggttggacgatcgtaacttcaaatccgaaacgttctacaaggtattcaatgggttctagaaccgcatggtgttccaaagcggtagtaatgatgtgtttgccatctgcttggtgtttcaagcagtagccttttataacggtattattactttctgatccaccagaagtgaagaaaatacgatttggaagagtatgaagagactgagcaatctgctcgcgagattctcggagaagtttactagccatccgtccatgagcatgaaggcttgatggatttccaaaagtggacttcatggtttcagacattttatcaatgacttcaggtagaaggggagttgttgcggcattatcaaaatatatcacattaagaccttatttcttgtggtaggcaaatagaggactaacaggttttctttcttgaatgcgaacaatagcttcagcgatcagttcgctagctgtcagatagttgatatttttaggtgttggcccatttggagcaacagaatcggttaccaagatttctttgatcggagcttggtctaataactcgacagctcctttcacaaataaaccatggcttgaaacagcataaatttcagtagctccttcgcgttcaacgatttttgaggcttccgaaaaagtcttcccagtattgaggatatcgtcgattaaaatagcttttttacctttgacatctccgatgatatagccataatcacggttcgcatcatcttgttcgtaatcaataatcgcgattggagcatcaagatattctgctaaactacgagctcgtttgacaccagagtttttcggactcacgacaacgacgtctgaacctgtcaaacctttgttaatgtagtgttcagcaaagagtggaatcgtaaagaggttatctacggcgatatcaaagaaaccttggacctgaacagcgtggagatcgagtgttacgacacgatctaccccagctttgaccaacatgtttgctactaatttagctgtaattggttcgcgaggagcagcagtccggtcttggcgagcataaccgaagtaaggcatgaccacattgacagtatttgcgctggcccgttggcaagcatccaccataattaacagttccatcaagtgattgttgacagggaaactggttgattgaatgatataaatatcatatccacgaacactttcctcaatattgacttggatttcaccatctgagaattgacgggatgaaatttttccgagtggaaccccagcgtgatccgcaattttctgggcaatctctggatttgaattgagagagaagagtttcatattttttttatctgacatgtgattctaacctcatttagatttttgatcttagcactattttagcaaaaatttacgataatttcagctattttacaatctttccgccaatctggcgattttatttttagcagttttgaagacgattccatgctctttgatgaactgattaaaattttcttcctgctcagcagtttccacctcgatttctaactcataatcttcagtatctagatagagactgtggtctagtgctactaagcctgcatcagtttctttttcgaatcgttctgttgtaaggcttccccagaccgcgagttgctcaactgggatttctttagagatcaagaggtttttgatttctccgtcaggaaactgttgttgttgaagaatctccttggtttcttctgggttgaggtcttgattgtactcgaaatggccaacatcttcagggactttgagagtcaattcagcctgatctgtgaaagtacgcacccgcaaggccattttttccttacggatgagctggtcgggtgtatcgatatagtgattggtttggacaaccaattctgtatcagcaaaaagtggaaggagggattggtattcctccctatctagcaaggttttgtattcaatttctaaatggttcattttgtggtcctttgctttttttcaaaagcgattcatgatataataagagatgtgtttattgtatacaaaaatggttcagattacaaggtggtaggatggcaattgattgggaaaacttcttagatccttatatccaagcagttggggaattaaaaatcaaactgcgtgggattcgtaagcaatatcgtaagcaacaaaagcattctccaattgagtttgtcacaggacgggtcaaaccgattgagagtattcgtgaaaagatgatccgaagaaatatttctgaagaaaatctggctcaggatatgcaagatattgctggtcttcgcatcatggttcagtttgtggacgatgtggatgagatcctagaggttctgagacaacggcaggatatgcgcgtggtccaagagcgagactacatccgccacaagaaatcaagtggctaccggagttaccacgtcgttgtcgagtacccggtcgataccattgatggaaatgaaacgatcttagcagagattcaaattcggactttgtccatgaatttttgggcaaccattgaacattcgctcaattataaatataaaggagactttccagacgagatcaaaaaacgcttagagacgacagcaaacctggcctatctcttggatgaagagatgggggcaattcgggatgcgattcaggaggctcaagccctgtttgatccacttcatcgtaagttaaatgatggcgttggaaatagtgatgacacagatgaagactacaggtaaaaaagtatccattattcgcaatcgcaagcgtcaaagtgaagaggtttttcagcaattgcgctacaagcttcggaaaaataattttattttgacggagaagcacccggatattgtgatttcaattggtggcgatgggatgttgctatcagcctttcacaagtatgaacaccagttagatcgggtgcgatttgttggtgtccataccggacacttaggattttatacggattacttagacagtgaaatcgataaactggttgagaacttaaaatatgatactggagctaaggtttcttaccctattttgaatgtcaagatcactttcgacaatggggaaacccgtaccatgagagcgttgaacgaagcaacgattaagagaagcgaccggaccatggttgccgatctcacgattaatggagtggattttgagcgcttcagaggagacgggattaccgtttcgactcctacaggaagtacggcttacaacaaatccttgggaggagcagtccttcacccaactattgaggcgctgcagattgctgagatcgctagtctcaacaaccgcgtttatcgtaccttgggttcttctgtcattgtccctaaaaaggataagatcgagattacaccgacgagacctggcttccacattatctctgttgacaattcaacctattcttaccgcaatattgcaaaggtagaataccagattgacaaccataagattaattttgtggcaagttccagtcacaccagcttctggaatcgggtcaaggatgcctttatcggagatgatagagaatgagatttgaattcattgtcgatgagcatgtcaaggttaagaccttcctgaaaaagcacgaggtttctaagggtctcttagcaaagattaagtttcgtggtggccagatccttgtcaatggacgtccggagaatgcgatttatttgttggatattggagatcacttggtcattgatattccagcagaagaagggtttgaaactctaaaacctatggatcggcctttggatattttgtttgaagatgatcattttttggtcttaaacaaaccctttggcattgcctcgattccaagtgcgattcattccaataccttagcaaattttgtaaaaggctattatgtgaaacaaggctacgagaatcagcaggtccacattgtcactcgcctggataaggatactagtggcgttatgctctttgctaaacatggctatgcccatgcccgcttggataagcaattgcagtctaaatcgattcagaaacgctattatgccttggtcaagggatctgggaagcttgatcctgtcggagagattattgctccgattgcgcgtgatgaagagtcgatcattactcgaaaggtagcaaaaggtggcaagtatgctcatactagctaccaggtcgttcaatcttttggtgatatttacctagtggatattcagttacacacaggtcgaacccatcagatccgcgttcatttttcccatattggttttccactcttgggagatgatctctatggcgggagtttagaagacggcattgagcgccaggcccttcattgccatcgtctatcctattatcatccatttctagaggaagaattggtcatagaaagtccactacctccagattttcaagctgtattaacacagcttcaaacaagttattaattattaaaaggagtaaaactcatggaagtttttgaaaatctcaaagccaacctcgttggtaagaatgcacgtattgtattacctgaaggtgaagagcctcgtattctccaagcagcaaaacgaattgtgaacgagacagatgtaacccctgtattgcttggtaatccagataaaattcgtatttacctcgaaatcgaaggggttttggaaggatatgaagtcattgatccgcattcttatccaggttttgaagagatggtagcttccttggtagatcgtcgtaagggaaaaatgacagaagaagaagcacgtcaaatcttgaaagacgacgttaactattttggtgtcatgttagtgcacatgggaatcgttgatgggatggtatctggtgcgattcactcaacagccgcaactgttcgtccggccttgcaaattatcaaaactcgtccaaatgtaaaacggacttcaggggctttccttatggttcgtggatctgaacgctacttgttcggggactgtgccatcaacatcaatccagatgctgaaggattagccgaaattgccatcaactcagctatcacagccaagatgtttggaattgatccaaaaattgctatgttgagctattcaacaaaaggatctggttttggtgaaagtgttgataaggttgttgaagcgactaaacttgcccatgaacttcgtccagaccttgaaattgatggggaattgcaatttgacgcagcctttgtccctgcaactgcagccttgaaggctccaggaagcaaggtggcaggtcaagctaatgtctttatcttccctggtattgaagcaggtaacattggatacaagatggcagaacgtcttggtggctttgcagcagtaggtccagttttgcaagggttgaacaaaccagtgaacgacctttctcgtggatgtaatgcagatgacgttttcaaattgaccttgattacagcagctcaagctgttgaacaataagaaatgcatttagagagtgggacagaaattagtaattcgttagaattcgatttcgtcgtcccacctccgcacagttgagtagggctgtaaaagctgatgaaatcagcgtagtagagcccactcaaccactgcgtcttgctcgacaatccaaaaacaattgagaggctaggacttttgtcccagcctctttttctttataaaatcagaatttctaaactataactcattctatggtatactaggaatatgttagatttaaaagattacgggattaccatgtgggaggaggaaaaaatcacttccttccgagaaaagttattaggctggtatgatgcccataaacgggatcttccctggagaaggacccaggatccttataaaatttggatctcagaaattatgctccagcagacacgtgtcgatacggttattccttattatgagcgttttttagactggtttccgacggtcactgatttggctcaagctcctgaagaaaaactcttaaaagcttgggaaggcttgggatattactcacgtgtccgcaatatgcagaaagctgcccagcagataatggaaaatcacggaggagtgtttccatcaagttatgaagctatctctcaactgaaaggaattgggccttatacagctggtgccattgctagtattgcctttggattaccagagccagcagtggatggcaatgtcatgcgtgttctagcccgtttgtttgaggtggactacgatatcggagttccaactaatcgcaagatttttcaagccatgatggaaatcttgatcgatccggcccggcctggtgatttcaatcaggcttttatggatttgggatcagatattgaatccccagtcaacccacggccagaagagagtcctgttaaggagtttagcgcggcataccaacatgggaccatggatcgttatcccattaaggctcctaagaagaaacctgtacccgtctatctaacagcctttattatcaaggatagtcaaggacgctacttgctggagaaaaatgagcgagaggggcttttatcaggtttctggcatttccccttgatcgaagtggaaagcctatctgggaacctagaccaattatctctattggatgggaagggggaagcagagcgtaacccagaaattcttttctttgaacaggactatgatttggccattgattggcaggacagatcttatcctatcatccagcatgtcttttcgcatcgcaagtggcaggttcagattcgatacggcctagtaaaagaaggggagcaaccagcaagcgaatcgactgtttggttaaaaccagaagaattttctgactatccttttgctaagccccagcaaaagatttggacgacttttacggaaaatgaaaattgagagtgggacagaaaacggtaattcgttagaattcgatttcgtcgtcccacctccgcacagttgagtggggctgtaaaagctgatgaaatcagcgtagtagagcccactcaaccactgcgtcttgctcgataatccaaaaacaattgagaggctaggacttttgtcccagcctcaatttttttataaatgagcgaatgctttaatttcttcttcggacatggatgagtcgcaacgaactgtgacttcaccggcttcgacatgtaaaaatcctgggacagttgggataccgtaggttgagcggaaggcttgtaatgcgtctagctgacttggttcttcactattgatgaagtagatatgagcttttgtttcagctacgacagttgctaacttagcagcgaacttccggcagtatggacaagtcttgcgtccgataaagaaggtggctgtttctttttgatcgatcgcttcttgtgcacgcgcgacagttgtcacttcaagatctttaatatcttctaaaaattgttccatgagattacctcgctttcttctaagtctagtatgccatattttctataaaaacgctggtatttgctacgaaagaaagagagagtgggacagaaatcggttattcgttagaattcgatttcgtcgtcccacctccgcacagttgagtagggctgtaaaagctgatgaaatcagcgtagtagagcccactcaaccactgcgtcttgctcaacaatccaaaaataattgagaggctaagacttttgtcccagcctcgtgttttagcctacaaaagcattgatttctgcttcgatattggcaattttttctttagcatctgcttcagattcaccaactgtagcgatgtagaatttgatttttggttctgtacctgaaggacgaacggcaaaccaggaatcatcagctaagatgtatttaagcacgttacttggaggagttgtcaatttttcaacgccgtcagcagtagtagctgtttgttccaagaagtcttctgtcttagcaatgtctgtcttgttgaattgtttaggagcattgccacggaatttatccatgattttcttgatttcagcagctccgtccacacctgaaagggtaacagagattgttttttctgcgaagtagccgtattgtttgtagatttcttcgataccatctgccaaagtcataccacgtgagcggtagtaagctgcgatttcagcaacgataagaacggcttggatagcatctttgtcacgtacgaatggtttgatgaggtaaccgaagctttcttcgaaaccaagcatgtaagtgtggttgtgttgtgtttcaaattcatgaattttttcaccaataaatttgaaaccagtcaagacgttaaacatcgttgcgccgtagctttctgcaatcttagtcaccaactcagttgatacgattgatttacaaagagcagcattggcaggaagagtaccagctgttttgtgagcttcaagaatatatttagcgataatcgctccgatttggttaccagaaaggtttagataagaaccgtctggttggcggatttcaacaccaaggcggtcagcatctgggtcagttgcaaccaatacatcagcgtctactttgcgaccaagttcttcagcaagagcgaaggcagcttggctttcagggtttggagatttaacagttgagaagtcagcatctggaacagcttgagcttcaacaacttgaacagcttcaaatccagcttgggcaagagcacgacgagccaacatttcaccagtaccatgaagtggagtgtagacaatcttcatatcgcgaccgtattcattgatcaagtcttggttgatgttaacgcctttcacttctttcaagtattcagcgtcgacgttttcaccgataacttcaatcaagccattagctttgctttcttcaaggtcagctaattgtacagtgaaaggattttcgatagcacggatgtaatctgtcaatgcatcagcatctgctggaggcatttgtccaccgtcttcaccgtatactttgtatccgttaaatggagctgggttgtggctagctgttaccatgatcccagcaaatgtgtggaggtgacgaacagcaaatgacaattcaggtgttggacgtagactctcaaatacataagatttgataccatgagcagccaaaacttgagcagattcaaaagcaaactcaggagagaagtgacggctatcgtaagcaatcgcaactccgcgttttttagcttcttccccttttgagtcgatcaattgggccaacccttcagtagcttggcgaacaacataaatgttaatacggttggtaccagcaccgattaatccacgcataccagctgtaccgaattcaaggttggtatagaaggcatcttcttttgttttttcatccattgcgaccaactcatcacgaaggtaagctggtaattcagcaaagtcgagccatttttggtagttttcttgataggtcatgcaagcgtctcctttttgcttataatttaatcgcttacattatagcaaattttttcagaaaattctagcgataattgtaaatcttttcaaaaaaataaagctaattcaccatcaaaaaaagccaagataaattggtcttggcttgaaaggttattttaatttttcaagagatggaacgactgcactggtaatgagtactgtcgcaacgacttcgatgagagagttggtagatacaatcaaggctaggaaatgttgaatcccccctccaaaactgttaccaaagaagaagtaaatcccgcttagaacgaaaacagtattggtcatagagccgacaattccagcgatcacaagtcctgtacgattgcggatccagcgatagacgaaataaggggttaccccgatgagaatccgaggaactatggcaatgagaagggagtagaggttcccgtgagggacaaagggactaaagagatagctggcgggtgttataacaagggtattcatggtgagactaaagagtcccatgaggagtcctaagatagctccaatccgtggaccatatatgatagaggcgattacgacaggaatatgaaccaaggttggttgaattcctgatggaacaaattgcagaatgaaagatgtcacaaagtgaatggtgatcatcaccgcaaaaaagatggcaattcgtgaaatagaagatgactttctcataaacaattctccttaacagcttcaacaatagcttctatagtcgctagagctccagaacctttgtccccacaagcaagagtagcttcacgaggttggataatctggtaaccatagtcttgtaagagttttagatttcgttgggtagcaggatgttctagcatttttgtattcatagcaggggccagtaattttttagtgttttgaggcagggctagagctgtgcttgtgaccatattatctgccagtcccatagccaatttagcaatggtattggcactggctggcgcgacaagaaagaggtcagtttctttcccaatgtcgatgtgctcgatccgctgtggatcgtcttccatcataacatctagccctacttggttttttgaaagaacttgcaaggttaaaggggtgatgaattttctggctgaaggggtcatgaggactttcacttcaaagcccaatttggttagttggctggtaatatcagcagccttataggcggaaatactaccggtaaccgctaaagtaatgtgtgtcatatgttcctttttatttgatataatgtaggatagcctctgcgatttctgttttcgtagaagcttctaggacctgatcgtctgtcactagataggcttgatgctgaccgttctgaatcttggtcagatcattggcaacgatcatgatggcatgatttttaacgaggctttcacgcgctacctggatcaactcttcagaagaaacgtcgactaatagcttaaagccgatcagttgaatagcagggttccattctttgacgagcgagataatcttgggatttttctttagaaagagcacttggtattcttctttggaagagattttagcttcctgattttcgcgatggataaaggtatgaaggtcttgagccttctcaacttcctcaaggcctgtcatgtaaacaggtgtgtagtctgaaacagccatagcgtgaatcaaaacctgatgatgagggacttccgctttcatttgtgcgactagttcttcgacattctggatcaataggagacgaaggtgtgggtgaggatcgggtttaagcgcggtaggcgttgtgatcaaggtcacctgatgtccctttgcaagagccatttctgcaaggattttccctaggctcccggtggaatgattggtgatcgcacgaaccctatcaatggcttcgctcgtcccgcctgatgtaattaaaatatgcatatgcttattttacaaaaaaaagatacgtaagtaaagttctgaagctattaggattagctatgtgtagccataaaatttacataaaaaacgaacgttagattcaaaaggtggaaaaaccatgttattttcgcgaattttaggtataatagatctatcaaatataaaggagtcccttatgaaaacagatatcgaaattgctcaaagtattgaactccaaccgattgtggacgttgttaagaagattggtttggtagacgatgatcttgaattgtatggaaaatacaaggcgaaattgagctttgataagattcgtgaagttgagaaaaatccagtaggaaaacttatcttagtcactgcgatcaacccaactccagctggagaagggaaatcaaccattaccattggtctagcagatgctttgaataaaattggtaagaaaaccatgattgccattcgcgaaccttctttaggtccagttatggggattaaaggtggtgctgctggtggtggctatgcccaagttctaccaatggaagacatcaaccttcatttcacaggggatatgcatgcgatcacaacggctaataatgccctctcagcattgattgataatcatttgcaccaaggaaatgagctaggaattgaccaacgtcggattatctggaaacgggtagtggacttgaatgaccgcgctcttcgtcatgtttctgtcggtcttggcggtcctttaaatgggattccgcgtgaagacggttttgatattaccgttgcttctgagatcatggccatcctttgcttggcgacagatattgaagatttgaaacgtcgtttggccaacattgtaattggttaccgttatgatcgtagtccagtttatgtccgtgatttggaagtggaaggggctcttgccttgatcctcaaagatgcgattaagccaaacctggttcaaaccatctatggaacgcctgcctttgttcacggtggcccatttgccaatattgcccatggatgtaactctgtattagcaacgacgacagctctgcatttagcggactatacaattacagaagcaggttttggtgctgaccttggtgctgaaaaattccttgatattaaaactccaaacttgcctacatcaccagatgcagtcgtaatcgtagcgactctccgtgctcttaagatgaacggtggagtgaccaaggatgctttgactgaagaaaatgtagaggctgttcgtgctggttttgccaacttgaaacgccacgttgaaaatatccgtaagtttggcattcctgcagtggttgctatcaatgaatttatcaccgatacagcagcggaaattgctactttgaaagaattgtgtgctgaaattgaggtgccagttgagcttgcgagtgtatgggcgaatggtgctgacggtggagttgaacttgctgaaaccttggttaaaaccatcgaaacaagtccagctaactacacacgcttgtatgataataacctttctgttgaagaaaaaattgaaaagattgttacagaaatttatcgcggtactaaggtgaattttgagaagaaagccaagacacaaattgcccaaatcgtgaaaaatggatgggataagttgccaatctgtatggccaaaacacaatatagcttctccgataatccaaatgccttgggagctccggaaaactttgaaattactattcgtgaagtggttccaaaattgggagcaggctttattgtcgctttgactggggatgtcatgaccatgcctggtctaccaaaacgtccagctgctttaaatatggatgtggctgctgatggaacagccatcggtttgttctaatagctagatatctaaaaacaacttctgttcaaatgagcagaagttgttttgatcttattaatcaatcattattcagtaaggagttggtacctgatttttcgatagattatgatgagctgtagagtcatgggaatccagataaggggttcgcagagaatgacccccatgtagccggtgtgaggaataatccacagaacgaagaaaatttttccaaacaattcaataaaactggatgtgagtggggttaattttttacccattccctgtagggcatttctcaggatgatgagactcgccaaaataggataaaagcaagagctgatctggagataaagactggcatttgcaatgagatcaggatttgtcgagccggaaataaagctggttatagacggacttgtgaagaatagaagagcagcaaccaagacagaccaaacccaagaaagaaagttggcaatggtaacgccttttttgatccgatggaattgctctgcgccaaaattctgcgagataaaggttgtgatacttgaggcgatagctgtaatcggtaaaacggcaaaggacatgatgcgacgagctgcgacctgtgcactgataatggttgttccaagctgattaatagcggattggaggataaccgttccgatcgaaacgatggaagtcatgaggcccatggcaaggccctgacttagcagatcctgataaagctccttgtcccaaacaaaatccttgcgatgcgggagcagaaaagggaccttcttacgaatatagagaagacaaagaagggccgaaataccctgagcaataatggttgcaatcccagcagattgaactccaagatgaagttgggtaataaaataaagatcgagaagaatattgagaatggcagcgataatcaggaagtagagtgccgctagactatcgccaaccgctcgaagaagtccagcgcaaagattataggcaaaggtcacagccacaccattaacaatggtagcgatatagagataagactgagacacaattgctgatggggtccctaaaaactggagcagtggataaagtccgacagcgccaatgaagatcacgaagagactgaggatgcaaccaataatagctgttgcggcgactgattttcgtaattggtcttcgtttttagccccataatttctcgcgataataatccccatcccattgccaacaccgacagcaaatccaacaatcaaatcaaaaatagcagaggttgccccaatggcggccaaagatttttgacctaaaaaacgccccacaatcataacatccgaggtattgtagagttgttgaaagatattggataaaagaataggaaaggcgaaactcaaaagagcgggtaaaataggaccatctatgagatccacacgttgaattcttttcatagtgtcattataccaacttcaggaaccagcgacaagcgtcgatagttgaaggcccttacattttttggtataatcagggcagaaaaggaggcttttatgagcttaaccagccaattaatcacggaaacgttcccagatctggacaaggtcgagaggctgaatatcgaggcatttccagaagaagagcgagttcctttgtcggaatacctgcgttatacggacaatgacgatgctaatttttttgctttttataacgaagaagaatttgtaggatttgctttttctatctataatcagaaagttttttatgttagcttctttgccattatgccccacctacgtagccacggttatggtcaagaaatcattgaaaaattggtagaattttaccaaagaaccatgattcttgaagtggaacgtttagatgaagaatgtgacaatctagagcaacgccagtctcggatggatttctataagcgaaatggatttaaaactgccaatgcctttttagaatacgaaggactgagctttgaaattctctatcggggtgatcactttgatgaagaggcttatcgcgatattttccgtaaactgcaggaagaaaattatttcgatttccgcattaaatatagacgctttagtgatcactagacaagaaagggagtgggaaagaactctgattagttaaaaagagttcgtattcccacccccgcacagttgattaggtcatctttgtagcttgaaaagcgaacaaagatgccaatcaaccactgcgtcatatagttacttctatcaagcatagaaggaaggctggacagtttttgcccagcctcttttagtttagatgttgaatgaagaactcaatcagtttcatgatttgtgtaaagaaccaaggcaggaatagaagagttaggaaggcgacatgccatttccaatagagtgaaaccaagccaacggtttctcgaatccaagcggatggaagatagtaaaaagctgtttttgaaccgatacttcgaccaggtattttcaatcgtctcataaagatacctgcacggagtgcgtgaaaagaattggtcaccacaaggactctcttgccaagcccctcttcttcaaggatacgcttgctaaaggtcaggttttcaaaagtagtacgagatcgattctcgatgagaatggcgtcttctggaaccccgtgttccatcaagtattcggccatagcttcagcctctgcgatgagctcatctgatccttggccaccagaaacaatcagctttgatcgtcccaagaacttctcatagatagcctttcctttatcaagacgctgggccaagagtgggggaaccttgtctccaatcaaacctgagccaagaatgataatggcatctggctctttgcgaactggaaagagattgcaaaaggtcccataggatacataagagaggtagagaaaggtcatgtaaaataaggcgaagtcagttagatagatgaggatgtcattccctgggaaatagggtagaaaatgtagtgccaaagctccgataataaacagtccataaagcagagagaggaggttggccagtctttttccttcaaaaagcatcatttgacggccgttaaagagaagaaaaagagaggagaaaataatgctgagaaaaacgaggatggaaatcactacaaagacaataatcgcaatttgttgattgaaccataactcggttcgtacgactagtaaaaatgcagaaatcagtagaagaagtcctaggtttatcgaaaagagataagcattaaaaagtcttctgcgatcactcataaagaacaataaaaagataagagctggaaataaccagaatagatatagatacatgctttactccttaaaaatcttacatccattgtaccataataagggagatctatagcttattgttcatgcaaattagttgcattcttcaaatgaatttgataaagttaagattatcgttttttttaaggagatcgtatgttacgaaaaggttccctgacaggtttattactgtttggtattttttttggtgctggaaacctgattttcccaccggctcttggtgctttatcgggtaatcaattttggccagctattgctgggtttgtcctttcaggagtgggaattgccattgtgaccttgattatcgggacacttaatcccaaaggatatattcatgagatttctcgtaaagtttcacctgttttcgcgattgtatacttagttgcgctttatctttcgattggtcctttctttgccattccaaggacagcgacggtatctttcgaagtggggatagcacctctattaggtggaatgaatgctagtttagcacttttcatgtttaccctggtctactttttgctagcctttctgattgccttgaatccatctaagattctagatcggatcgggcgtattttgaccccaatctttgcgattctcattttgatcttggtcattcttggagctttaaaatacagtggacacgctccaatggtagtcacaaaagcctatcaggcttctgcctttgggcaaggatttttagaggggtacaataccttggatgccttggcatctgttgcctttagtgtgatcgcagtgacgaccttgaatcaacttggattttcaagtaagaaagaatatatcaagactatttggctggttggaattgtcgtagcccttggttttagtgtgctttatatcggtttaggatatctggggaatcattttccaattccggcttctgttatggcatctgatagcaataaaggggtgtatgtattatcagaagcgaccaaagcgatctttggtccgactgctcagattttcctagcaggaatggtgacggtgacttgctttaccacaaccgcgggtttaatcgtctctaccagtgaattcttccatagcaccttccctaaggtttcttacaaggtctatgcaagtgtcttcactctgattggttttgcgattgccaaccttggcctgaatgccattattgctttctcattgccagtcttgatgattctttacccaatcaccattaccattgtattgattgtgatagtgaataaatttgtggctctttcaaaaccaggaatgcaactgactattttcttggccagcttggtctctcttgcaagtgttctggcaagtacctttaaaatttcactagtagaaaaggggattgctttgcttccatttgctgctcaatctcttccatggttggtgccagtagtcatcgggatccttttatcgctcgtattaccaaataaacaaacggcagaagaataagtaatattagaaactctaaagttttgtgctttagagtttttttgaaactagtatccaattccaaattttagtaaaaaaacgtagcggaaatttttattataggtcaatcaatgttatactgaatgtggcatatcaatatacggagttaactatgaatccaatcgttttttcactgacagtttttcttgcaggtattctgtctttcttttctccctgtgtctttcctttgctaccagtatatattggaatcttgctaggaagtgatcaggaaaaggctatccgattgttcgggaaaaagattcgctggcatggcttattgaaaaccctttgttttattgccggtatttcggttattttcctcctcattggttttggagcgggcttacttggacaagtcatttatagtccttggttccgttatctgatgggagccctcatcattatccttggtcttcatcagatggaagtctttcactttcatttccttgagaagcaaaaaacaatggattttggagccaacaaacagaagaatgaattgttctcagcttttctccttggtcttggctttagttttggttggacgccttgtattggtccggtattgggatcagttcttgctttagcagcatcagatgggcaggatgctcttatgggagctgtttatctcctagtttatacattggggatggcccttccgtttttactgttggccttagcatctagtctggtccttccttactttaatcgactcaaaacgcatttgttgttgctgaagaaaatcggcggagccatcattattctgatgggaattctcttactcttgggacaattgaacagtttgtcatctattttttcataaaaatatcggaggtttaacgcatgatgaaaggttttaaatatgcttgtttctcagtactttctctagctttgctgtcagcttgttctatggatcaaaccagtgagagtagtatgggcaatcagccaacaatgaatacaacaacgaataagaatcctttggtaggaaaagacgctagtgactttgaactaaaggatatgaaggggaatacggtcaaactttcagactatagaggcaaaaaagtctatttgaaattttgggcaacctggtgtggtccttgccggcaaagtatgcctgaattagagaaattggtcaaggatacggatagagactttgaaattctgaccattatggcaccaggactccaaggtgaaaaaacagaagaagaattcgtcaaatggtttgatcaacaagattataagtccgtaccggtcttgtacaatccagatggttctgcatttgcagattatcaggttcgctctattcctacagaagtctttatagacagtcatgggaaaattggacatgtccaattaggggctatttcaaacgaagatgctaagaagatcatcaaggagttaccataaaaaaatgaagcacgaggcttcatttttttatggtttcttagttgcttgcaccagaagtggcatcggcatctccgtgccctccgtcaccatgtcctccagcatcagaagcaccagaagttgcatctgcactaccgtgtccaccagcaggagcaaatggaccgcttccgccaactagacgttgtcctgttgtttgcaggtaccagtctaaccatggtttgaagttgaagacaatctcattgataccagcataagaaccatcatcatagtacatggcttggtagttgtgggtattgatcacaccttcaggtgatcctgggacaatggtccgaacatattcttggtttccattgcgaagggtaccaattacccattctacgtttttcatacgtgccggtggaagggatccgtgaactgttgacatccggctaccagattgagatggtacacgtttggcaaacatggtatctggatcttgatgggcattgttgtaatagaggaattggttgttatcatcggcataggtcaactcaaatggcatggccttcaagaacatattaatttggtcaacggttaggataccgtggtctagtttcacataagtgtcgccagaaacggcacctgtgatttcagctactttttctacccaatctggatcgtcaggatcgacttcagtaacagttgtagcgattggatgattacaatccaagtcttctggttcaattggttttggttttttcaatttagatacaacctcaacgtatttcataaaattatccaagcaggtttcaaggaatttgacggttccctcgttgatgatattgccgtcttcgtcaaaagcttctttcgcttttccaagaaggaattcatttcctggaagagtataagcattgacacctggggcatcgaggatcttacggaggtgaacttgcgcacgtgaagtcccttgatcgtagtaagaagcaccaacgatcataactggtttgttttcaaatggatgcacctcgaaagaaagccattcaagaacagacttgagggaagcagagatcgtatggttgtgctctggagtagcaatgatgacaccatctgctcgagtgattttgttatataagagacgtaattggaaactttcgtcccatttttcatcttggttgaacattggaacttcatcgatttcaagaacttccaattcaaatttaatcttaaattggcggcgaatgaattccaagagtttacggttatatgattgatcgtagtttgatcctacaagtccaacaaatttcattcttttctgtctcctatcttacaagttttcccagtcaaattcttcagcatctttgcgaagcaattcttgggcattgcgcaatttgtctgtaattttcacaaacacacggaaatcattgaagatggcatctaatttttgaataacatccaaatccaccaagtctccattttgatcaaaggcttgcaatgaatgagaaagcaagaattcatctggcaagacattcgctttgatttctggagcatttaagatttggcgaagttggagttgggcgcgtgaagatcccaacgtaccgtatgaagccccagtaatcatgactggtttattcaacaatgggaagactccgtatgagagccaagcgagtgcactcatcaagactgctggaatagagtggtcgtattctggagttccaataatcaccccatcagcttcctcgattttggcaacaatctctaagacggattcaggcacttgtttgtcggctggtttgttaaagacagggatatctttaatttcgaccaattcgatctcagccttgtcagcaaaatgcttttgcatgtattgaagtagttgacggtttgtagaacgtttggagttagtccccacaatcgcaataagttttatcatgaaaaattcctttctgatagtagaattataaataagattgaagcccacttgtataggcgatcttgcctgattgcgaaaccaataaggtatccataccaggaagtgattcaacaatgttaaggatggaagcaggagattccccaaatagccgggtagtccaaatctccccatctacagatcgatctgaaataatagtaatgctggccaagtctgtctcaaccggatagcctgtcgcactatcaaagatatggtgaaacgactgcccgttgacttctaaatgacgctcgtagatgccagaggtgacaatagacttattcttgacggagaggactaataggtgttgccctcttttttcaactggattttgaatgccaatccgccaaggctgttgtttgatggggtgttgaccgacagtgaggatatttccacccagatcaatcaaggcatctgtaattccttgatcttttagaaatgcaccaataagatcagcgctataaccttttgccaaagccccaagatcaatcttcatcccggaacgtttcagaaaaaccgtatggttttcagggtcaagttggatttgctggggatcaaccttagtcagcgcttggtctatttcctctttccgagggcgtctagcatctgaaaaacctatccgccaagtctgaacaagaggaccaatagcaatgtttaaatggctatttttggcctgactgtgctgtgtccctagtgcaatgagttcaaaaagatctggatgtacccgaactggcgcaataccggcttgacgattgacctccatgagttcagaacttgcatcattagcactaaagcgatgttcgtaagagcgaagaatctcaaagcattgagctaagatttcatccgctagagtgtgaaagatcgaaacggtgatggtggtccccatcagacgttcggatcgactgcttagttccactaaaaatctatcctttccaattttcacttacttacagtatatcagaaagagaccgttttcacaatcctttcaagcaaattatttgacaatcctatatgtatgtgaaattttattttctgtaaatttgaaaaaaagttcacaaaacttgagcaaaataattgtaaccgatatcatttttatgatatactcagggggtaaattaaattaaaggtaggatttattctatgagtaaaatcgttgttgtaggggctaaccatgccggaacagcttgtatcaacactatgttagataatttcggaaatgaaaatgaaattgtggtttttgaccaaaactcaaacatttcattccttggatgtgggatggcgctttggatcggtaaacaaatcgacggtcctgagggtcttttctactctgacaaagaaaaattggaagcaaaaggtgcaaaagtctacatgaactctcctgttctttcaattgactatgacaacaaagtggtaacggcagaagttgatggaaaagaacacaaagaatcttacgaaaaattaatctttgcgactggatcaacaccaatcattcctccaattaaaggagttgaaatcgttcctggtaaccgcgaattcaaagcaactcttgaaaatcttcaattcgttaaattgtaccaaaacgctgaagaagtgatcgaaaaattgaaagataacagcaaacacttgaaccgtatcgccgtcgttggtggtggttacattggtgttgaacttgctgaagcttttgaacgtcttggtaaagatgttgtcttggtggatatcgtggacactgtcttgaatggctactatgacaaagacttcacagacatcatggcgaaaaacttggaagaccacaacatccgtttggcacttggacaaactgttcaagcggttgaaggagatggtaaggtagaacgccttgtaaccgataaagaaagcttcgatgtagatatggttatcttggctgttggattccgtccaaatacagctcttgctgatgggaagatcgaactcttccgcaacggcgccttccttgtcgataagaaacaagaaacttcacttccaggtgtatacgcagttggtgactgtgcgactattttcgataacgctcgtaacgaaatgagctatatcgctcttgcgtctaatgcggttcgttcaggtattgttggtgcctacaatgcgactggtcatgaattggaaggaatcggtgttcaaggttctaacggtatctctatctatggccttcacatggtttcaactggtttgactcttgaaaaagcgaaagctgcaggcttcaatgccactgaaactggctttaacgaccttcaaaaacctgaatttatcaaacacgataatcatgaagttggtatcaagatcgtctatgataaagactctcgtcaaattcttggagctcaaatggtatcacgtgataacgccatctcaatggctatccacatgttctcacttgcgattcaagaacacgtgacgattgataaattggctttgacggacttgttcttcttgccacacttcaacaaaccatacaactacatcacaatggcagctttaactgctgaataatgaataaatgaaaaacaaagctagcggtgctagttttgtttttttctgtctttccatgtattcagaggcagtgaaataaggtataatgaataggataagagtttgaaggagttagggaatgtctgctaaagaagaagcctttaaaaatgaatttcaatttgcctctagttcaattgtggcccatattgtcagaggtgttctggttgggatcgttgtgggctgtatcgtctcgagttttcgttttttgatcgaacatatttttcattttgttcaaggcgtttacaaggagatgtctggtcaaccactttatttgctggcgatgctgttggggtatggggtgatcgtactgattgctggtcgccttattcgcaccaatcgggatatcaagggatcaggaattccgcaagtcgaagcagagctcaagggcctcttggcggtgagctggtgggataccctgtggaagaagtatattctaggtgtcttggccatcggaagtggcttgatgctaggtcgtgaaggtcctagtattcaattaggagcaatgggtggaaaaggagtggcccatcatttgaaggtcagcccagttgaggagaggtctttgattgcaagtggggctgctgctggtcttgccgctgcctttaatgcacctatagcggggcttttatttgtggttgaagaggtctaccatcatttttcacgtttcttttggatttcgaccttggctgctagtttgacggctaattttatttcactcaatgtctttggtcaaacaccagtgcttcatatgccacaaaatattccaccgctccatctgtctcagtactggatttatctttttctcggtgtctttttaggggcagcagggtatgtctatgaaatagtggtcctcaatatcggtcgcctgtatcgtttgctagagaagattttccatgttccttctcattattcttccttatttgcctttgtcttgattcttccaatcggctatttgcttcctcaaattcttggtggtgggaatcaattggtcttggatttagctcgagtaccgtatccagtgctgaccatccttctctattttttgatccgtttcatttggagtatgttgagctatggtagtggcttgccaggaggcatcttccttccaattttagcattaggatctcttttaggagccatcgttggaaccttccttcaaaacattggctttatctctcaaaaccagctacctcttttcattattttaggcatgagtgggtattttggggctatttcaaaagcgcctctgacagctatgatcttggtaacagagatggtcggtgatattcgcagtttaatgcccctaggcatggtgaccttgctggcttatatgatcatggatctcttccatggagcaccagtctatgaagccatgctcgagcaattgttaccggataaggcgcaagaagaaggagagttaactttaattgagatccctgtatcagaaaagattgcaggaaaacaagttcatgaactgcacctccctcaagatatcttgatcaccacgcaaatgcgaagcggtaagagctatacggtcaatggtgcgactcgcttgtatctaggtgatagcatctttgtggtggttaaagaatccgaaattggacgggtcaaggatattcttttataaaagacagattcacataaaagtttttatattattaaattttcagacaattattgaaaaatgagaaaacatctggtaaaataagggcaagaacaaatgaggagaagtctttcatgaaaaaatatagtctactcttattgagtgttgctcttttagcagggtgtgcaaattctactagcaaacagtcgagtcaaaagacgcaaactagctcaacggtgcagttgtcaaaggctgaccagaagaccttggacaatgcgacagctgaatacaaagactttgttgaaatgcaaattgatcaattgctcaaggatacagaaggattccgtgctacgctaaaagctgggaatttggaagaagctaaaaagcaatatcccttgatccgcatggcctatgaacggtctgagccgattgctgaaaccttcggggaatcggatgtcaaaatcgactaccgtttggtggattatgtggatgaaaataaatcagaagatggctggtcaggtttccaccggattgagcgtatcctttgggaaaacaatactacagatggaacagacaaatacgctgaccaactggtgaacgatatcaaggagttgaaagctaaaattgctacagtagaagtcacaccggatatcatgttgaccggagctgtcgatctactcaatgaagtggcaacacaaaagattacgggtgaagaagaagtcttctctcatacagatctttacgacttccgcgccaatattgaaggggctgaaaagatcttctctctctttaaacctttgattgagaaaaaagatgccaaattggttaaaaccttggaagcagaatttaagaatgttaatgctttattggacaaacacatgacagatgattcaaactataagtcttacacagatttatccaaggaagataccaaggaattggcagaagctgtgaccaaacttggtgaaccgttgtctcaaatgggtgtgattttagatgggaaataagaaaaatggctgacgaaaaatttttagataaaaaaatggaccgccgtgaatttcttaaaaaagcaggtattggagggactggtctagcgctgggcctctctggtgcatctgcttttttcgctaatcaagacagttccagcaaaaaagcttatgatggggatgaagacatctccttttatggcaagcaccaagcagggattacaacggccatgcagaaggcttgctacttggttgtattagatcttcacacgacggacaaaaaagaagtcatccagctctttaaagactggaccgattatagtagtaaactagttgaaggagaattggtcaaaaaagatggttccaatgccctcttacctccaacagatacaggtgaaacagtgggactcaacccctatcgcttgagcctgacttttggggtatcggcttcctttctaaagaaactgggcttggagtccaaacgtccgaaactctttcgtgatttgcctccatttccaaaggagcagttgcaggacaaatacactggtggcgatatcgtcattcaggcctgtgcagatgatgagcaggtagcctttcatgcggtgcgaaatctgattcgtaagggtcgcaataccattaccatgaagtggagcaaatcaggatttgcagctattggtgaccgaaaagaaacgccccgcaacctctttggtttcaaggatggaacagcaaatgtcacgacggagaaggactttgataaggtcgtctggactgacagcaaggactggatgaagggtggttcctatatggctctacgcctagtgcaaatgcacttggaaacttgggaccgaaccaatttgcaggagcaagaaaacacttttggtcgctacaaggagtccggtgctccctttggtaaaaccaacgaatttgatgaggtagatttatctaaactacctgtagattcacatgttcgtttggccaaagaagtggatcgacctattttacggcggtcatattcctattcggatggcatcaatgaacagactgggcaatttgatgccggcttgatctttatcgcctttcaaaaggatccgaacagctttgtcaaaatccaaaccaacttgggtgcggtggataaaatgaacgagtacatcacccatatcggaagtggactctttgcttgctttgcaggcgttgagaaaggagggtatcttggtcaagctctctttgaataaactcttgatcttgttcggccttcttgccttgttctggactcatccagtggctgcggagtcttatagcgatctctttatcaagatcacagatgcaacaaccgctgtacaaaataaggaccaggaaaaggccatggccttaatcgctgagattcaggctgattttgaatccaaagaccaccatgattccaaggcaggaaaaaaagttagccaagctctggctataaaaggggaggtaagaaaagaggatcttaccaagatctcatcagccttgctagcttttgaaaaagagcaaaatccggtcgatttagaggcggaaaaagacaaactcgtgagtcgcctcgcaccttattttaagaacctacaagaggccattacagctaagaatctggataaaactcgtcaaacctatgcagatctcaataatacctggacccgtaacgaagcggtggtaagagatcacagcacagcctactatggcaaaatcgagacggccatttcgctcttacgcagtagtattgaaacagaacctaccgattttaccaacatccagtcctcttatgatgacctcaaaaatgggattgatgcctttgtaaaaggtgaagccattagcagtgtcagtacggatttgacattggaagatgggatcaagcttttggaaaaggcacaaagccaattccaatccggcgacgataaatctgctgcagcgactatgaagcagttcatcactatctggccaactatcgagggagatgtcagcacgaccaatcccagtctctacacgcgcgtagagagcgaatccccggtcattatggtcaaggggaaagaaaaggcctatcaagagaaattacaagccttgatcagagacctgtctgcgatcgatacgacagcttcttacaacgcctttgatgccatgttgattcttctgcgtgaaggagtggaagcccttctgatcgttatggcgcttgtgacgacccttaaggctgctaagatgaggaaaggactcaaatgggtctacggtggagctattgctggtgttcttgccagtgcagcaattgctcttgttttgcaagtagcatttccagccgttacttcggggtctaaccgggaaatcattgaaggtggcgttgggattttcgctgtggtcatgatgatcctcatcggaatttggctccacagcaagtcctccgtcaaacagtggaatgcctttatggaccgtcaaatgaagacagtgacggctactggaagctttgtgtcgatgtttgctctcagtttcttagcagtctttcgtgaaggggctgagaccattctcttttatgtcgggatcattccgcggattacaaccgcgaatttcttactgggaatcgggcttgccatagccgttctcatcatcattgcagtggctatgactaaggctagtcaagctatccaacctcatcgaatctttttcattctgacgtggttgatttacgccttggccttcaagatgctcggtgtcagcattcacgccctgcagttgaccaatatcctccctagccatttggtcaatggacttccaactatcgattgggcggggatctatccaagctgggaagttcttcttcctcaatttatttttgtggccttgatcgcactcgttacggtgagacaacatggcaaagagtagagcagatgaaatgaccattgttgaacatttagtcgaatttcgaaaacgattgatcgcagtggtcttgtgttatgttatcgtcttcattgtagcctttgtatttggtggagaactctaccaagccttgactgctagcctgcatcaaaaactgctggtactgggaccaaatgatatcctctggatctatgtatcgctagccaatctcactgcctttagtctgaccttgccctttattgtctaccagatttggcaatttgtaaggccggctttgaaggaaaaggaggcgcgtgcagtctttgcctacattccagctagctttatttgctttgtactggggcttgcatttggttatttctttgtcagcccagctattttagaggtcttgatgcgcttgggagaaggactgtttgatacccaattaacagcacaaaattatctaaccttcttatggcacaccaccttgcctttaggggtcttgttcgagttaccagttttggtcgcttttctgacctcgattgggctcttgacaccacagtttttaataacctaccgacgatacgcttactttgtcctgctggtcttagctgtcgtgctaacccctgcagactttatcagtgacttggccatgacactccctttgatcctcttatttgaagtcagtgttgccatcagtaaagtcatctattcaagaaaaaggagaaactaatgggaattttacgtgatattggagcaccaggtttgatcatcatcatcctgggcgccctcttgatttttggaccaaaacgcctgccagagttgggccagtccatcggaaaaatgtttgctgaatttaagacagctgtcaataaaggcagtgaagaagccgaccaagaatcaaaagaagctaaagaagaaaaagaataatcagacaattttcaaaattctattgagttcgattgcataaaaaggtataataagacaagtacttgcaatcgacgaaggaggaaaccatgattattacgattttgtcactcattttctattttagctatatcggattcttatgctggttggtcgtaaaaattgtcgaaaaattgttcaatttcttgttgaaccgttaataaaaaaacaatccatttcaccccaagtgagtggatttttttcttattcattcagataggatcaaacataaggggacttcaagggtctctttttgtgtatctaatccctctagctagtgactaacttgaacttcaaactgtatttcggtatgatagtatacaaaggatgactaaatatgtatagctttcataagcttttaatcttatagaaaagagacaaaacacatgcagtattattttatcggtggcctaggtagcaatcgctaccatctggctccacttattgaaaatctaggctttcctgtgacctttctagatccctatagggaaatgattcagacagaaaatgatctttgtgcttggtttcaaggtcagatcggccaggcggaagagatctgtttattggggcattccttgggtggagatttggatcgttatctggctgccgggttccctcagattcgagctctgattctcctggatgggggttatctggatatggaaaagatcctgcctcttgaagaagaactagaaggaacggcgtctttcatgcagcagcaagtttttgcgactttagaagaagctgtgttatccgaacttggtgatggagcagatcctactcctatagcgcgaaaagcggtagaggctagctatcgttggaatccagcgagtgaacaatatgaattaaatctggatctcgaaaaggtcatggctttattgcgtctacggcgtcagatcaagacttaccagattccactggcagacctgcctgtcctctttatcgggcctcgataccaagaagaacctgaatggagaaaagatgctctgaagcaactagatctccagatcaagcaagtcttgctagaaggtttggggcacgaactgtatacagaggcgcctgaaattgtagctagagaagtgaacaattggctccaaaatgttcataaataaaacctgtttctctttttgaaacgggtttttgtcttgtaatttccgaacgttatttcctataaaatcattcccattgcattaggtccgtatctttggtataatctatcaaggaaacgtcaagagacgtagcgatgcgcttgcgcataggtaggtcagtttttagaaaagagatttttcaatctatgttaaatgaatttcctattttcgactatgaagatattcagttgattcccaacaaatgtatcatcaatagccggtcagaagcagatacaaccgtccaatttggaaagcataccttcaagcttccagtcgttcctgccaatatgcagacgatcttggatgagaatgtagcagagcagttggcgcgtggtggttacttctacatcatgcaccgttttgatgaagcgggacggattccttttgtcaaacgcatgcatgatcaaggtttgatcgcttccatttcggttggtgttaaggaatacgaatacgactttgtgagtcaattaaaggcagatgctcctgagtatatcactattgatatcgcacacggtcatgcggatagtgtcattcggatgattcaacacatcaagaaagaattaccagatacctttgtcattgctggaaatgttggaacacctgaagctgttcgtgaattggaaaatgcgggagctgatgcgactaaggtcggaatcggccctggtaaggtttgtatcaccaaagttaagactggatttggtacaggtggttggcaattggctgctcttcgctggtgctcaaaagcagcgcgtaagcctatcattgcggacggtggtattcggacccatggtgatatagccaaatcgattcgtttcggggcgtctatggtcatgattggttctctctttgcaggccatatcgaaagtcctggtaaaacagtagagattgatggagagtcttttaaagagtactatggatctgcttcagagtaccaaaaaggcgcttataagaacgtcgaaggtaagaagattttattgcctgccaagggtcatttgcaagacaccttaacggaaatggaacaagatttgcaaagttcgatctcttatgcaggaggccgaaaattagcagatttgaaacacgttgactatgtgatcgttaagaattctatctggaatggcgatgcacactaattgaattacttatttatttcacgaatgggcgtgatgtttctacaaggtgccggaacacctaacaataagtaagtcgggattatttctctttctagagagatttcaaggcttgcttagcaggcctttttgtgttttgtgaatgaagtagaggatttttttaaaaagtaggaggaagtatgaaattacttgaagagcgcatcttaaaagatggcaatgttttaggtgagaatatcctcaaggtggattcctttttgacccaccaagtggatttcaaattgatgaaagaaattggtcaggcttttgcggaccggttcaaagatgctggtgtgaccaaagtcgtgaccattgaagcgtctggaattgcaccagccctttatgtagctgaagccttggatgttcccatgatctttgctaagaaggcgaaaaacatcacgatgaatgagggcatcttgacggctgaggtttattcctttaccaagcaagtcaccagcaccgtttcgattgcgggtaaattcttggatccatcagataaggttttgatcattgacgatttcctcgcaaatggccaagcagccaaaggcttgattcaaatcatcgaacaagctggtgctcaagtcgaagcgattgggatcgtgattgaaaaatccttccaagatggacggggattgttagaagaattgggatatccagttgtatccctcgcacgtttggaccgttttgaaaatggtcaggttgtatttaaggaggcagacatctaatgcaaaaacaagaaagccattcacaggcggccattctaggcttgcaacaccttttggccatgtattcgggatctattttggtgccgattatgatcgcaggagctttgggctataacgctcatcaactaacctatctcatctctacagatatcttcatgtgtggggttgcaactttccttcaagtgcagctcaataaatactttgggatcggtcttccggtagtccttggggttgctttccagtctgtggcacctctcagcatgatcggggctagccatggtagtggggccatgtttggtgccttgattgtctcagggatttatgtcatccttgtctctggtttcttctctaagattgccaatctcttcccatcaattgtaacgggatccgttattacaaccattggtttgaccttgattccagtagcgattggaaatatgggaaataatgcgccaaaaccaaccgttcaaagcttgattttggctgtggtgaccattctcatcattttagttgttaatatctatacgacaggctttattaaatccatttctatcctgattggtttgatcgcagggactgccattgcggcttctatgggcttggtagacttcacacctgtggctcaagcaccagtcgttcacgttccaacacctttcttctttggagctcctaagtttgaaatcacctcaatcgtcatgatgtgtatcatcgcgacagtttctatggttgaatcaacaggtgtctatcttgcactttctgatattaccaaagatccaattaatagcacgcgccttcgcaatggttaccgtgctgaagggttggctgttctcctaggtggtatctttaataccttcccttacactggattctcacaaaacgttggcttggtgaaattgtctggtatcaagactcgtctcccaatctattatgcggctggtttccttgttcttcttggtctccttcctaagtttggagctttggcacaaatcattccaagtccagttcttgggggagcgatgctagtcatgtttggttttgtatcgattcaaggaatgcagattcttgcgcgtgttgattttgaacacaatgagcacaatttcttgatcgcagctgtatcgattgctgcaggggtaggattgaacaacagcactctcttcaacggccttccaacaggattccaaatgttctttgcgaacggaattgtcgttgccagtgtcttggcgatcgttctcaatgctattttaaaccgcaataaaaactaaactcacatgagccggaggtccttggatcttcggtttttttgacttttaaagaaacatatagtagagtggaagaggagaaaatctaatttgatgagaagagagttagaatcatgtatgtaacctatcactttaaagagcgcttgcgcttgtttttgagtttatttttaccgattttaatctaccaattggccaattattcagccagctttgtcgatacagccatgactggtcagtaccgaacccttgatttggctggtgtttctacagctaccagtctatggaatccattttttactttcctgacagggattgtctctgcgctgacgccgattgttgggcatcacttaggcaagggaaataaagaacggattgctggcgatttttaccaattcctctatatgtcatttggtatggccattctcttaataggctttgtttgggggattgcgcccatgattctcaggcagatcggtttagaaaatgttgttgcccaaatagccattcgctatttatatttcctttctctaggaatcttacctttgttgctctttagtatcgtgcggaccttcctcgataccttgggaatgacgcgtctatcgatgtacttgatgctcttgctcttgcctttaaatgcttgttttaactatatcctgatctatggggcatttggttttcctgagatggggggagcaggagcaggtcttggaacctctctggcctactgggtcttgctggttattgcggttttgatcttgtgcaaacaccctaaggtagcacctttccaattgtggaagccgcagccttatgattttaaagggatgaaagaagtattgcgacttgggcttccaatcggtggaattgtttttgcagaagtcattatcttctcgctggttggtctgttaatggcaaaattcccatcattaaccatcgccagtcaccaatcagccatgaatttttctaccctgatgtatgctttcccggttagtatctccagtaccatggcgattatcgtatcttacgaactgggagcaggaagaccagaagtggtcaaacaatattgccgtttgggacgactgacagcctttggttttgccattgtcaccctcgtctttctctatacattccgcttccaactggcagggctatatggcaaggatccagtctttgtgcaacaaacagctattttcatgacctatagcctctttttccaagtagccgataccttcgcagcaccccttcaagggattttgcggggctataaggatacaaccgttccattcttattaggtgtctttagttattggtgcatctctatcccgctagggattttccttgaccatgtgaccaacttgggtccctatgcttattggatcggccttatttctagccttgtcgtgagtggaatttgttaccaacttcggctctggcagatcgaaaaaaaacaaacaaactaaaatgaagtctgggaaaccaggctttttgtgtaccgtgaatattataaattttctgaaagttcttgacaattgatgtcaaagtggtaagattaggaggtagaaatgaagaactagaaggagaacaagatgagaagtgatatgatcaaaatggggatcgaccgagcaccagcgcgtggtctcctctatgcaacagggcaagtaaaatcagcaaaggatatgcaaaagccctttattgccatttgtaactcctatattgatatcgttccaggacatgttcacctacgtgaattagcggatgttgctaaggaggctatccgcgaggctggtgggattccttttgaatttaataccattggtgtcgatgacgggattgcgatgggccatatcgggatgcgttatagtttgccatctcgtgagttgatcgcagatgctgctgaaacagtcatcaatgcccactggtttgacggtgttttctatattcctaactgtgataagattacaccaggaatgattttagctgccatgcggaccaatgtgcctgccgtattttgttctggtggacccatgaagggcggcgttgacatgactggtcatcaagctactctctcaagtttatttgaagctgtaggtacttatcaagctggtgatatgggcatggatgagctggatttcttggaaaaaaatgcctgtccaacttgtggttcttgctcaggtatgtttactgccaattccatgaactgtttgatggaagtattaggtcttgctcttcctggaaatggtaccatcctagctgtttcagatgaacgtcgggaattggtccgtcaagcagccaaacaattggtagagaatattaaaaaggatatccgtccacgggatattgtgaccaaagaagccatcgacgatgcctttgcgctcgatatggctatgggtggttcaaccaatactgttcttcatacgctcgctattgcgcgtgaagcagggattgactatgatctcaaagatatcaacgagattgccaagaagacaccttatctttctaaaattgcaccttcaagtgtttacaccatgcatgatgtgcatgaagctggtggtgttccagccattatcaatcagttgattaaaaaaggtgccattaagggtgatcgtattacagttactggtaaaaccttgaaagaaaacgtagctggtgctgaaatcaaaaatgaagaaattatccatccaatcgagcatccgatttcacctgtaggtggtttgtcgatcctttacggaaatatcgctcaggatggagctgttatcaaggtcggtggggttgatccgtctgtgaccactttccgtggtaaagctatttgttgcgattcacaagatcaagcccttgagttgattgacaatggaacagttaagaagggacatgtcgttgtcattcgttacgagggtcctcagggtgggcctggtatgccagaaatgttggcaccaacctctaagattgtcggacgcggtcttggtaaggatgtggcactgattacggatggtcggttctcaggagctactcgtgggattgctattggtcacgtttctccagaagcagcagaaggtggaaatatcgccctaatcgaagacggggatgaaatcgtgatcgacctaccaaatcgtacccttgatctacttgtcgatgatgccactcttgcagaacgtcgcaaacatttgaaacctttcaaatcaaaaatctccagcggttggttgcgtcgctatacagcctttgccaaatcagccaatgtcggcggaaccttgatgagtgacgaagaattcgaagaacggaaagcagaacgtcaagcccaagaaaaataagaaaaagcctttcctgctatgtgatatcacaagcaagaaaggcttttttagtggaaccattatttggtgcgcatttcaccttgagggaagtaggttccttcaggcatatcattaatgataacgtgaacagctgactgaggagcgccagtattgcggacaacagcttcggttacttccttggccaaggctttcttttgttccaatgtgcgtccttcaaataggtcaattcgtacaaatggcatatggccacctcctaaattttttataggactattttatcacattttgggatacaaagcttagcaaaattatggtaaaatgataatgaaacacattttagagagaacaaaaggaaaatggcacaattatattataaatatgggaccatgaactcggggaaaaccattgagattttgaaggtggcccataattatgaagagcaaggcaagagcgtcgtcatcatgacctcagcaatcgatacacgagatggagtaggagtggtttctagccggatcggtatgaaacgcgaagccgttgcgatcgaagaggaaaccgatatctttggctttattaaaaaccaagcaatcaaaccctactgtgtcttgatcgatgaagctcagtttttgaaacgtcaccatgtctatgacttggcaagagtcgtggatgaactggatgtgccggttatggcttttggcctcaaaaatgatttccgaaatgaactctttgaaggttccaaacatctcctcttgttagccgacaagatcgaggagatcaaaaccatctgccaatactgttcccgcaaggcaaccatggtcttgcgtacccaagcgggtaaacctgtctatgatggagagcagatccagatcggtggacacgagacctatatctccgtttgccgcaaacattattttaatccagatataccaactgaaagagtctagaacgttttagagaggataataatgtctatttgtttaaaagatattacaatagagaattattttgacgttttaaatctagaagttcatccaaaccaaagggattttattgcatccaattccattagtttagctgaagcctatgtatatgataaaaatggtgattttatagctcccttagcagtttatgataaggaagtattagttggttttgttatgattgcctatgaccagaaaattgggatcagcaagggaaattacttgttatttcgttttatgatcgataaacgatttcaaggtttaggctattttaaaccgactatggatgcagtcattgactttgttcgaacagagccagctggaaaagcaacaagtctttggttatcttatgaaccggaaaataagcaagcgagatcttgctatctccattatggatttaaagaaactggcgaagtcatagaagacgaaattgtagcaatctatgatctaacaatcaagaattaaggagcaaacatgaatatctatgatcaactacaagctgtagaagaccgatacgaagagttaggagaattgttgagtgacccagatgtggtctctgataccaaacgctttatggagctttcaaaagaagaggcttccactcgtgatacggtgacagcttatcgtgagtacaagcaagtccttcaaaacattgtggacgctgaggaaatgattaaggaagcaggcggcgatgcggacttggaagaaatggccaagcaagagctaaaagatgctaaggctgaaaaagaagagtacgaagaaaaactgaagattttacttcttccaaaagatccaaacgatgacaagaacattatcttggaaatccgtggagcagcaggaggagacgaagcacaattgtttgctggtgacctcttacaaatgtaccaaaaatacgcggaaagccaaggctggcgctttgaagttatggaagcatctatgaacggtgtcggtggtttcaaagaagtagttgctatggtttctggtcaatctgtttactctaaacttaagtatgaatcaggtgcccaccgggtacaacgcgttcctgtaactgaaagtcagggtcgtgttcatacatcgactgcaactgttcttgtcatgcctgaagtggaagaagtagaatacgatattgatccaaaagaccttcgtgtggatatctaccacgcttctggtgctggtggacagaacgtcaacaaggttgcgactgctgttcgtattgttcacttgccaaccaacatcaaggtggagatgcaggaagaacgtacgcaacagaagaaccgtgagaaggccatgaaaatcatccgtgcgcgtgtggctgaccactttgctcagatcgctcaagatgagcaagatgctgagcgtaagtcaactatcgggactggtgatcgttcagagcggatccggacttacaacttccctcaaaaccgtgtgactgatcaccggattggcttgacccttcaaaaattggacaccatcttatctggtaaattagatgaagtggtcgatgctttggtcttgtatgatcaaactcaaaaattagaagagttgaataaataatgttgttgggatcattattagcccagtatgaagaagaattaatagccgtcggagaggaagcagaaagcctctccttcgcatatcgtgctttaaaaaactggacctttacagactttgtccttgctttgcaaaaagaagtggaagtagaggatcaggccttgcttgattccatttttgaacagttgaaacatcacgtccctgcccagtatattattggtagtgcagaattctgtggccatgtttttaaagttgatgagcgcgtgctgattccacgaccagagacagaggagttggtggctctcattctcgaagaaaacgatgagaaagccttacgagttctggatattggtacaggaagtggggccattgcgattagcttagcccttgctagacctacctggcaggttcaagctagtgatgtctcagaagaggctttagccctagctcaagaaaatgccaagcaattagaagctgtccttgaattcaagtcgtcagatgtactggacgaactagaaggtccttatgacctgatagtgtccaaccctccctatatctcccgggatgatgtagaagaggttggagcaaatgttttagcctctgaaccccacttagctctctttgcagaccgtgatggatatgccatctacgaaaagattgcccagcaagcaccaagtgttttaacaccagacggaaagatctatctagaaattggctataagcaaggagccaaagtaaaagagctctttcgagaagcgtttcctgacaaacgagttcgagttctgaaagaccaatttggacaagaaagaatggtagtagtagacaatggataacattgagaaagaattagaagcaggccgtgcggttattatgccaactgaaacagtctatggtattttcgctaaagctctggaccaagaggcagttgattatatttacgaattaaaacgtagaccgagagacaaggctctgaatttaaatgtagccgacgaaaaaacgattcgaatttattcgaaaaatcaacccagctatttaacaaaactgattcattcatttttgccagggcctctgactattattcttcaagcgaatgaaaaggtacctaactggattcattcaggattggatacagttggtttccgtataccggctcacccaaagacattggatttaattcgtaaatacggccctttggttggtccctctgccaatctttcaggtcatgcaagtggaacaaagtatagggctattgtaagcgaatttgatcaagtggttcctggtatagaggatgatgactttctgacaggccaagattcaactattttggatatctctagttccaaagccaggattttgcggcaaggttctattacaaaagctgatttgcttgcacaagtgccggagctttcttttgaggaagatgaacttcctcagtgataatgtacataaataattttttataaaggagtagaccgatgatttttgataaagaagattacaaagcttatgatgcagacctatggaatgcgatcgctaaagaggaagagcgtcaacaaaacaatattgagttgattgcttctgaaaatgttgtctctaaggcagtgatggctgctcaagggtctattctgacaaataaatatgccgaaggctatcctggtcgtcgttactatggcgggacagatgtggttgatgtggtcgaaagtctcgcgatcgaacgggctaaagaaatctttggggctaaatttgctaacgttcaaccgcattcaggaagtcaggcaaactgtgctgcctatatggccttgattgagcctggtgataccgtcatggggatggatctagctgccggtgggcatttgacgcacggagcttctgtgagcttctctggtcaaacctataactttgtgtcctatagtgtagatcctgaaacagagctcttggattttgatgccatcctaaaacaagcccaagaagtgaagccaaaactcatcgttgctggtgcctcagcctactctcatatcattgatttctcaaaattccgtgagattgcagatgcagtaggagccaaactcatggttgacatggcccatattgctggtctcgtggcagcaggtcttcatccaagtccggttccttatgcccatatcacgactacgaccactcacaagacccttcgtggacctcgtggaggtctgatcttgaccaatgatgaggaattagctaagaaaataaactctgctattttccctggtattcaaggaggaccgttggagcatgtcattgcagccaaagctgtcgcattcaaagaagcactggatcctgcctttaaagagtatgcagctaacgtgattaagaacagtcaggccatggctgatgtcttcttgcaagatccagatttccgcgttatttcaggcggaacagagaaccaccttttccttgtcgacgtcaccaaagtcgttgaaaatgggaaagtggcgcaaaacttgttggatgaagttaatatcactctcaacaagaactctattccttatgaaaccttgtctccatttaagacaagtgggattcggattggtgcagcagctatcaccgctcgtggttttggtgaaaaagaaagtcgcaccgttgctgaactcatgatcaaagcgctgaagaatgcggataatcaagaagtattagatgaagtgcgtagccaagtcaaagccttgacagacgcctttccactttacgaggactaaaccatcttatggatatttacgtaaaaaaagccatcattcatcaatttagcccagacgataccgatctctatctggcagataaatttctcaatatcacacctaaaatcgaggaatacttgcgtaagaagattgaacgggtctactcggatgaagccaagactggtattttcgaagaggacaatccttttcttgagatgatctcagatgacctattagaaacttcggtcgtagtagcgaatcgctggaaggaagaatttgtcgtctctgagaatcaaaaaaccaacgatttggtttttgttgagttttcaaaagaaggggtggaccattttgcctttcttcggattgccttacgggaaaccctgacgcatcttggtggtgaagtggacaatccgattaagttgacgcaaaataatctacctggttttgggactggtgcagatgaagctttggtcatcaatcttcaaagccgcaaataccacttgattgaaaaacgaatcaagtacaatgggactttcttgaactatttttctgagaatctgttgcaggcgcaacccaagatctctcctaaaaaatcgatcaaggcactagaaaaaacagcacagaagattgcggaaagctttaacacagatgattttcaatttcaatcaaaggttaaatcagctatttttaatcatattgaggaagaaaataaactctctcctgagaaattagcggatgatctcttcgacgacaatctgacagctcgccttagttttattgaccaagttaaagaagctgtaccagagcctgtcacctttgaagagattgatgcaagtcgccagttgaagaagttcgaaaatcagaaattgtcattgtcaaatggaattgaactgatcgttccgaataatgtctatgaagatgcagaatctgttgaatttattctaaacgagaacgggacctattctattctgatcaaaaatattgaggatatacagagtaaataatgattaaacgtatagtgaagatcttcttattcatcttactaatatttggaatctacaagggaattcagatccatcatgacgtcaaacaagtcatgcagtaccgctccctggttagagaagtccttgctgaggaggacaccacggccaatgaaaacctcattcttgctatgatctatactgagaccaaaggcagagaagacgatgtcatgcaggcgagtgagagtgcaagtggtgagaccaatactattagtgataataaggccagtattcgccaaggaattcaaactctttcagatgagttaaaagaagccaagaaaaaaggcgttgatagctggactgcggttcaagcctataattttgggaaagactacatcgattacgtcgcaaaacacggtggaacaaattccttagagttggcccgcgcttattcgcgggatgtggtagcgccaagtcttggcaatgtaactggtgaaacttatctttacctccaccctatctctcttttaaacgggatggaactctacattaatggtggcaatatttattattcccgtttggtagaaaccaatatgacgattatgaagttattttcatggttttaatcatttttcagagagccgattggctcttttttttagctgatcagttctgcctctgattttgagggataataaaaatgtcatgcattcttaaaagaactgtaagctagttttaagaaatcaactgtataatgaaaatcgaagtgggtaaactctttatttacttcttttttcatctctagtgaggtgagaaaggttataagagatgcccagagttgatttgagttagaaagaagaaaaagatgaaattaaagaagattgcattgtttgtaacgacgactttggccttgtttaccgctatcccgcgagtttccgcagatagcaatgtgcagaaagtcattgatgaaacctatgtcaagccagactatgttttgggctattcgctggaccaaagtcaaatcgaacaaacattgagtctcttgaactacgatagttcaaaagataaagaagagtggaaaacgatgacaccagaggtttattcttcgattatgaacgttgccaacgatgatagtttggaactttattcctctgttaaaattcaaaaattaggtaaaaataagccactagaagtgaatatcgtgacgcctcaaaacatcaccaaggtcactgcagatatgtatcgtaatgcagccgttacacttggattggagcatgctcaaattacagtagcttcccctatccaagtgaccggagaaagtgccttagctgggatctattactcgcttgagaaaaatggtgccaaggtttctcaagaaagcaaggatctagcccaagaagagttaaagactctatcaggtatcaatgaagagaacgcgggaaagaaaaacttcgatgcggataaattgaacgtggcattgaccgacattaaaacggcagtagccaatgccaaacagaacaatcaggatttaagcaaggatgatattcgaaagatcgtcgaagaaacccttaaaaattataagctggatacaactgtaacaggtgatcagattaatttgatcgtgaatttcgcagtcaacctctcaaagagcagcgtcattagcagcaaaagctttactaaaaccttgtcggatctgaaagatagtatcgtagataaggcaggcgatacctttaacaatatcaatctgaattttgataccaatgctattttaaaagatagtggtaacttctttacaaatgcgtggaatgccattgccggcttcttcggagccatctggaatgccattgtcaaattctttagtggtttagttggctaaaaatagcaggaaagcactcctgacaagaagtcagagtgctttttgtgtgtttaatgattcttatattttataagacatttttagggttgctaaattctaattttaagctcgtgaaaaaaaggtccactggggacggggacctttttttatttctgtctttggaagtagtggctatgacacaattattgctcaggatgttcgttttcaaaggaactatatacttcgaaaagttgatttcgtttagtgatctcaagttttataaaaatattgtgtacatgtgtcttcacagttccaactgaaagaaacaattgatccgcaatttcctgattatttttgtgttcaagaagtaaaggaagaatttctttttcacgttcagttaaatgaagtttttcagagaatagatctattgtactggggttgtcaattttttgggatttatcaaatgaacttaattgattcgaaatagctttccaatcagaaagaatatatttgattattaaataacaaacagcaatagtaaacatgtcttcacacatatttctattttgaattcgcagattcaacaaatcatacgaatctatattaaaaattacaaataaatcttctaagataattagaatgccaaatagcactcctatatttgaaatagtttttaagtaatttttatttcgactactaatatttaaagatgttagatttcgtctcgcatatataccagtataaattaaaagaagctgattgggtaaatagtacataaaaactcttaatggagaattgtttagaattgggaaagccatccatatgaaagtaatagaaataaagcaatagtgcgttaataaaggtgtttctttcctcagtctagcaactatccaaaactgacaaatattattaacaagatatatgatagttttaacaaatggaactcccaaaaagtgttggttatatgtgtttccgaaatctttaattatttctgtcattgataggatcagattatcaaaaataaaaaaaacaagatataaaccgactacaaaaaataagtattttttatccttttctgagtttaaagaataggtcaatacaataccaagggtcaaagtatacagtataattaaaaatacattgtatatataaactatttcaatcatatttagcctccattaattctgtgaaactaattaaaactctaaactttatttaaaagcaataaaatagggagtttatatttaaaatagcattacatttttaaaagcataaatactgggtttagtacttaaacttttaaaaaaagggtttacacctttaagtttatcgcaaactataaaattttgcaatatcattaaagcataacaacacaggaggtctcaattatgagcaataaaattgattatattacaacagaagagttctctaaagagcaacttttagaaatggctgagctatctcttaagattaaagcttgtattaaaaatgggtattacccacctttgttgaaaaataaaactctaggtatgatttttcaacaatcatctacaagaacacggatttcttttgaaaccgctatgactcaacttggagggcacgcacaatatttggcacccggtcaaattcaactaggaggacacgaaacactagaagatacagcaaccgttgtttctcgcttaacagatattataatggcacgtgttgagcgtcataagagtgtagttgatttagcaaaattttctcaagtaccagtaattaatggtatgagtgattataatcatcctacacaagaattgggagatctgattacgattattgaaaacttgccgaaaggaaaaaaattagaagattgtaaagtagtatttgtaggagatgcaactcaagtatgcttctctttaggattaataacattgaaaatgggtatggaatttgttcacttcggtccgaagggattccaattaaatgatatgcataagtcaaaatatgatgaaatttgcaaactatcaggtggtaaatatttggtaactgatgatatagattcaattactggtgcagatttcttatacactgatgtatggtatggcttatatgaagcggaattatcagaagaagaacgtatgaagattttctatcctaaatatcatgttgattcagagatgatggcaaaagcaggagaaaattgcaaattcatgcactgtttacctgctacacgtggcgaagaagtgtctgatgaagtgatggatggcccaaattcagtttgttttgatgaggcggaaaatcgtttaacttcaatgcgaggtatcttagtttatctacttcgtgattttgaaaaacgacacccatatgaccttgaaaaacaatctgtagctaaagcagaactggaatcttttttaaaataaaaaggatcaatttgctttaaattgacgatgttataactctcctcttaaaggaaggagaaaaaaatggaagaaaagaaaaaatttagtttatttactacagtattaactgtaatatgtgtagtatttgttgcagaagctgcagctccagttgcagcgattgggaattctcaattcttttggtggttatttttattaattgcctttttgttaccatacggattgatttcagctgaattaggtactacttatataggtgatggtggaatctatgattgggtgacgaaggcgtttggacaccgatggggctcaaggacctcctggtattattggattaattttccattgtggttagcatcgctagctgttatgactcctggattgttgacaacgataacaggagttgagttttcaatgttctggacattattaattgaacttgtatttatttggttaattatatggataagcttttatcctgcaagtgatagcgtatggattctcaatggtgcggcaattataaaaatgatattagctctattagtgggagtcttgggattatatattgcctttacaaaaggaatggctaataaaattacgttggattcacttttaccatcatttgatttaaacagtctatcatttatttctgttattatttttaatctacttggctttgaggttatttgtacgtgtgcggatgatatggagaatcctaaaaaacaaataccacaatctataattgtagcaggtttagttattgcggctatttatatattttctgcatttggtattggtgtagctattcctgttgataaaatttctacaagtagtggtatgatggacagctttaaacttttgaccggatcagaaaatggatggtttataattttaatggcatttctattcttattaaccctttttggaaatatgatttcatggtcattaggagtgaataacactgcatgttatgctgctgaaaacggagatatgccaaagttttttgcaaaacgtagtaaaaagaataatatgccaattggatcagctttagcaaatggttttgttgcaacatttgtagtagtcattgcaccaatattaccaaatcaggatctgttttgggcattcttctcattaaaccttgttatgttcctactttcttatataccagtttttccagcattttataagttaagaaaaattgatccagaaacccctcgaccttttaaagtaggaggaagtgatcttattttaaaaattatggttgtaattccaattattatgattttgatctcgcttttatttacagcattcccattatctttggatgaggtaacattagctgataaattacctgtaactatcggttcattaatttgtcttatcttaggtgaagttattattcgtgtgaaaaaaatcaaaaaatgatagtaactaaataccaatacaataaaaggaggacttgagatgtctaagcgtattgtggggacaacccctaaagtagatggatttcgaatgccaggagaattcgaagaacaagaacaaatttggatgttatggccatggcgaaatgataattggcgtctaggagctaaaccggctcaaaaagcatttttagatgttgctaaagcgattagtgaatttgagccagtttcactttgtgtaccacctcttcaatttgaaaatgctatagctcgtgtatctgctcttgattgcgaaaatataagagtaattgagatgacaaatgatgattcgtggattcgcgactgtggtcctacatttcttataaatgataaaggtgaacgtcgtgcagtagattgggaattcaatgcatggggtggtttagtagatggactctatttcccttgggatcaagatgcgcttgttgcaagaaaagtttgtgaattaacaaatactgattcttataaaacagatgattttgttttagaaggtggatcaattcacgttgatggtgaaggtacagtgatggttactgaaatgtgtcttcttcatccaagtcgaaatccacatttgtcaaaagaagaaattgaacaaaaattaaaagattatttgaattgtgaaaaagtaatttgggtgaaagatggtattgacccatatgaaacgaatggtcatattgatgatgtagcatgttttgtaaaacctggagaagttgcatgtatttacactgaagatgaaaaccatcctttctataaggaagcaaaagatgcgtttgaattcctaagtgaacaaacagatgcaaaaggcagaaaattaaaagtacataaaatgtgcgttactaagaagccatgctatctaaaagatgcagatacgattgatttttcagaaggggccattccaagagaggaaggagaagttgcaatcgcatcatatttgaatttcttaatagtgaatggaggagttattctccctcaatatggtgatgagaacgatgcattagcggttgaacaagtccaagcgatgttccctgatcgtaaagttgttggagttgaaactacagagattgcatatggtggtggtaatattcactgtattacacagcaacaaccagcaacgaaataacatatgcagagtctggtaaagcagactctgttttttctaatatatcgcattaagtagacggaggaatatgaagataaattactttactaagaggtattagagatgaaaaatattaaagtagaatatagctggttgaaaaattctgcgataacaggagtcaatcaattacctgaacattctgagcattattattttgataaatatgtaggtataaatcaactagactgttttcaaatagataagatgcacttaaacagtaattggacttacatgaaatcagatttcaatgaaaaaaatggtgatgacgaatctacattggtaactttgttgaatcattttaaagttgaagataaattaattactaaaaatattatcttgaaaatgcaaagcttaaatcttccagtgtatatttggatgaatgggtgctttgttggattttcaaagggacttgaacagtctatagaatttgaaattacaaatttactacgtttggaggaaaatgaacttataattaaggtatgctctattgaagaagaaaaacaaaacaataatgtgatgctagattcaacgttagattcaatcttagacaaaatttcggagagtattatttatagtactcctaaactacatgtatatgattttaatgctgtattaggaaatagtcaaaatttaaataaaacgacattaaccattgattgcttattaaatggatattctaatagcgctataattagtgtttatatatatgataaagaaaaaaatattatttttaaggagaatatagattatactaataaacttgaaaaaagatatgatttagatataaattatttagcgatttcttttgtagaattgttgataattgatgatggaacaatagtagaaacagctataacaaaagttaagatagtgtaggaggagttatgtaaacataaaaagaaataaatcccttttagtagatttgcgaaagatcactctataagggatttatttcttttacacaatttactacattattgtttaatttcccagtctcaaaacgagatatgatgaaatttttcattcttcttatagagaagaaactataatttgcgtttttacatcctaaaactaaaaagccctatcagatcagtttctggtggggcttttggtggggaaacaatcaattttgattgatttttaacctttataataacctaaagtgttgttaaaacaaccttttcacttcaaatcatgtttataaatcattcccactctacagttgcaggtggtttacttgtgatatcgtagacgatgcggttgacgtggtcaacttcgtttacgatacggactgagattttttggaggacttcccatggaatcttcgcaaagtcagctgtcattccatcgatagaagtgatagcacggatggcaatagtgtagtcgtaggtacggccatcacccataaccccaacagaacgaacgcctgtgttgacagtgaagtattgccagatatcgcggtcaagaccagctttggcgatttcttcacggaggatagcgtctgattcacgaacggtttcgagtttttcttcagtgatttctcccataacacggatggcaagacctgggcctgggaatggttggcgccatacgatgtggtctggcataccaagctcagtaccaagcgcacgaacttcatctttataaagagtgttgagtggctcgatcagttcaaactgcatatcttctggaagtccaccaacgttgtggtgagacttgatggtttgagcagtatccgtaccagactcgatcacgtcagtgtagagagttccttgtgccaagaatttcacatctttgagcttacttgcttcgtcatcaaagacataaacaaactcgttaccaatgatcttccgttttttctcaggatcagatactccagctaacttatcaaggaaacgttttgcagcatctgctttgactatgttcaaaccaaacttgccaccaagcatctccataacttggtcagcttctcctttacgaagaagaccgtggtctacaaagatacagatcaattgatcgccgatggctttttgaaggagaaccccaacaacggaagagtcaacaccacctgaaagaccaagaaggacacgtttgtctccgacggtttcacggatttttttgatctgcatgtcaatgaagttgtccatggtccaatcacctttagccccacagatgttcaaggcaaagttacgcaggatgtcataaccgtgaacagagtgacgaacctcagggtggaattggattccgtagattttcttgtctggattttcaatcgatgcaaatggacagtcggcagaagtaccagtgcggataaagtcagtcggaatttctgtaacagcatccccatggctcatcaagaccaattgtttgtctggtgtgccagcaaaaagagcagaagattctgtcaaagtcaattcagattgaccatattcgcggttaccagcatcacctgcaggaacgaccttcccgcccaatttatgggtcaacaattgcattccgtaacagattccaaggattggaataccgagttcgaaaatttcaggatcgatatcaaaagaaccttcctcgtatacagagtttggtccgcctgaaagaacgatcccaactggattgattgcacgaacttcatcagcagaaatcttatggctcttcaattctgagaagactccaatttcacgaatccgacgtgaaataagctgattgtattggctaccgtagtcaagcacgatgattttttcaacatcatgcaaatcagttgataggtttgtcatcttatccccttcttaaagaaatttactttcctctattctaacacaaaagccttgtctttaccaatctctgattgaagaattaggaattttacgctacaatagagataacacagagaaagagcaaggttatgattccagcttacattcaaattcatgatcagattaagtctgagattgatcaaaaaatatggaaaatcggggagcgtcttcccagcgaacgcgatctagcggagaaatttcaggttagtcggatgactcttagacaggccattacccttctggttgaagaaggagtgcttgaaagacgggtaggaagtggcacctttatcactagcacgcgcgtccaagaaaaaatgcggggaacaaccagttttacagagattatgaaatcgcaaggcaaggaaccttctagccaagtgatatcttaccgtaaaaccattcctagcctccaagaagtggataaattgggcatcgataagacagagaccatcattcggatggaacgggtccggtatgctgatgggatccctgttgtttatgaagtagcctctattccagagaaatttattaagaatttcaatcgcgaagaggttaccagccatttcttccaaaccttggagcgtcatggctataagattggaaagtcgcaccagaccatctatgcgcgattggccaaggataagattgcggactatttacagatttcaaaaggacaagctattttaggtctgacacaggtttcctattttgaagatgggacggcttttgagtatgtaaaaagtcagtatgtcggcgagcggttcgaattttatttggaaaataactaagctcgcaattcacagtaataaaaaaactcttcaaatgtttgggagactttctctctttggcatttgggagcttttttaggttgaagacattctttctaaatagtgatagtaaaggcaaaatggaaatattttaaaaaatttaaaaaaatttttattttttcttcaatttttgattttttttacgaattaatagatagaagcaggttttaaagcttaataagagatataaggcaggaaaaaatgaaaaaaattaaaatagatgtggtagccgttcccttgagcgggcatctgtacccaactttaaatctcgttaaacccttgttagatgatccttcgatggagatccgggttttcacaggacctcagaaaaaggccgttgcagaaagttttggcttcactgtcgttccaattctagaggacaaagtagaagaatttgaacgcgcggcgaataacgataagaaactcaatcttttttcagcttatcggcaattatccaagagtctggatttgattaatcatgtatcggatcaattgttagaggagtggcgcgtcaatcgtccagatattgtgattgctgattttatcactctatcagcaggcttcgtggcagaagagttagaaattccttggattaccaccatggcaacacaatttgcgatcgaaactccttatggtcctccttgcttcttcggagggatgggagtcgcgcgcacaaaaaaggaagagaaggtacaagcactatgccgtaaactcacgcgcattggaaaatactgtggggctttcctcttacgcaaacgcttaaaacgttacaatttcaagttgtacaatcaaaatggagtggagaccatctactctccttatgccatctttggaattgggatgatggagctagagttgaagacacacttccctcatcaatatgcgtggcttggccctttgggaacttctcttgaaaaagcagaagattatcctttagatctcagtccttacgaggacaagacgaaggtactcgtgacatgtggaacccagttgccttgggcgaaggagaacttgcttcagcaaaccaagcagttggccaaagaccatccagaatgtcacttttttgtcactcttggagatggggcaaaggaattctctgaagaagaagtagcgccaaatgtgacggttgtctcatatctaccctacaaagaatatattccgcagatggactatgtcattcaccatggaggagctggaatcttttatcagtgtatcgaatttaaaaaaccagccttgatcttgccacatgattatgaccaatttgactatgcgattcgaggagtagaagcaggaattgcttttcaagcacatcgcaatcgcaccgaagagattcaagcaggttttaaggccctattagaaaaagaatcttgggaaaagttagaaagactaaacaaactttcaaaaacctacaagcctttggataccttggagtttgaaattcaacgattattaagacgtggaacggatgggaaactatgaaaattcttgtaacaggtgcgactggcttccttggaaaatatgtgatcgatgagttgttggctcacgattatttcattgtagcctttggccgaaacgaaaaaattgggaaggctctggaaagtgagcgcgttcaatttatcaaaggggatttgagcgctattgaggaattaagacaagcctttcagtctgttgatgctgtggttcacgctggagctttatccactgcctggggaccttggaaggccttctatcaggcgaatgtagttggtactcaaaatgtccttgacttgtgccgtgaatatgcggtaaaacgcttggtttacgtatcttctcccagtatttacgcagctggaaaagaccaattaaacatcaaggaaagcgatgctcccaaagaaaatcacctcaacaattacatccgaagcaaattggcgtctgaaaaacttttttctgactattcagatgtgccaagtatcatcttgcgacctagaggattatttggtgtgggggataccagtattttgccacgtgtcttacgcctcagtcgaaaaattggaattcctttgattcgaggaggagagcagctcatggatatgacctgtgtggaaaatgtcgccctagccattcgcttggctctggaagcaaaagaagcccacggacaagtttataatattacaaatggggaaccaaagacctttaagtatttgatcgaaaccacactaaagggattgggagagccgattcgctatcggaaacttccagcaggtctagtagcaggtgtggcttatagccttgaaggggtgtatcgattctttcatctgaaagccgaaccccccttgactcgctatacctattatctccttcgatatagccaaaccctcgatattcaaaaggctcaaactgaacttggctactatccaaaaatgaccattgaagaagggattgacaactatgtccaacatgatcaagcacattgattattttccagcaggctattgcagcagtcattctggtctcttatttaaggggattccgaatgaaaaaatgcaatttcctgcaggtgtctttttgattcatcaccgtgaaaaaggctatattttgtacgataccggctatcactacgagattaagaaaaaagctcggtatttttggtaccgtctagccacccctatgcagatgaaaaaggaagaccagatcgattatttattgcaagagcgggggattaatccagcagccatttcctatgtgattctttcgcatctgcacccggatcatctcggtggagcagcactttttccaaatgctcatttcgttgttacccaggaagtctatgaggtgtaccaaaaaccgaaatttaaagatctgatttttaaagagtttttgccagctgatttcaaagatcgggtgacttgtctcaaagcagatcaaaggcttcctgctttcccctatcgcccgactgcggatctttttggagatgggagcatccttgtttcgtccatcgatgggcatgcgagagggcaaggttgtctttatctggatgaactcaaactcttcatcggagcagatctttcttggggagtagaccttttgcctttcacacggaaaatgcgacttattccttccttggttcaggatgataagaaggcttatttaagaggagctgatttgctggaaacactcttgcaagatggcattcaagttgtggtcagccatgacccgcaagatcggattgaaaggattttaaatgaaaaaaacagtctttctgaaaacctttattgaaaccagatggtgccatcgattccgttcaaaagaggccttgaaccgataccaagataagcaattggcacgctaccatacttttatcacttctcagtctccctatttccagactcattctcctgaatcctttgggaccatggataagcatttcatgatgacgcatttcaatgaactcaatactctgggagtggatcgagatcaggctttagagatggcgattcgtggagaacaaacgcgagattttaccgagatgaatggagaagtagcagtaggcttgtcttctgggacttccggccaccgaggagtttttgtcaccacagaaaaagaaagaagtatgtgggctgcagcaatcttagccaagatgttgccaaaaggaaacctggttggtcatcgcattgcctttttcttacgagcagataatgaactctatcaaaccattaattcaggccttattcgcttggaatattttgatattttcaaggatagcaaggagcatttagagcgtctcatagactatcaaccaaccattgtggtcgcaccagcttctaccttgattgagttagccaactatgtcagcaatcagcaacttgcgatccaacctgtcaaggttgtttctgtcgcagagattctagaagatcgagatgctcagaccatcgccaaagcctttcaactagacaaggttgatcaggtctaccaagcgaccgagggatttttagcttgtacctgttcagaaggcaatctacatcttaacgaagatattttgtatgtcgaaaaagagtatcttgatgatagccgcttttatccgattattacggatttcaaacggaccagtcaacccatctatcgctaccgactcaatgatattttggtggaagaaaagtctccttgcccttgtggttccgtctttactcgaatcgcaaagatcgaaggacgatcagatgatatcttctatttcaaaaaagaagatggtagtagccagatgatctatccggattttattcggcggtgcattctctttgtcgaaaatattcaggactatcaagtaactcagttggcagatggatccattaccattgccttgagtcaccggacagagtctatggagcaagcgatctttgctcaatttgaactcttagctcagcaaaaacaattcattctcccaagtattctatttatcgattaccaatgggactcaacacgtaaattaaaacgtgttcaacgacttcaataaaaggagaatcctatgactaccgtaaaaagacatttgcaaattaaaggctatggaacagcgcttccagctcatacagtaactttcaaagaccagactcgttaccgcgtgaaagaaggagaagaaacacagattgatcttgcagcgcgtgcgattgaggcagctttaaaccatgcaggacttgagatgacagacatcgactgcctgatttctgctagtgcggttggtgttcagcccattccttgtacagcagctcttatacatgagcgcgtggccaagggactgacgattcctgctatggatatcaataccacttgtaccagttttgtatcagctttgagcactgtttcttatctgattgaaggtggtgaataccaacgggttctgattgtatccagtgaagtaggaagcctagggcttaatcccaaacaaaaagaaagctttgaactgtttagcgatggcgctgcagcctttatttttgaagcaacaaaggaagataaaggaatcattgccagtatgcaacgtacctggtctgagggagcccacgataccgaaattcgtggtggtttgacagcttatcatccgaaattgtactctgaagcaaccaagactgatttcatgtttgacatgaaagggaagaaaattcttttgctttctgcccgtgttattccagaaatgttccaagaattccaagaaaaatcaggcatttctaaagatgctgtagactatattattccccaccaagcaagtcgcgctttgccactcgtcatggataaattgggagttagcaaagacaagtacctcaatattgtcagtgattatggaaatatggtttcggtagccgtgcctttcggcctagcctatgcactggatcatggctatgtgaaggaaggagataccatcttcttgatgggaactgcagcagggatgacggtcaatatgttggcactgaaactttaatgatgaatcctcttacttcaagctcaaaaagcatcaagtcccgctagtctttagcgggcttttttgatataatgaaaggtatggaaattgagaaaaccaaccgaatgaatgcgctctttgagttttatgcagcgctcttgacggacaagcagatgaactacatcgagctttattacgcagatgactacagcttggctgagattgcagaagagtttggagtgagccgtcaagctgtttatgataatatcaagcggacggagaaaatcctagaggattatgagatgaaattgcacatgtactcggactacattgtacgcagccagatttttgatcagattttagaacgctatccggaagatacttttctacaagagcaggttgaaattttatcaagcattgacaatcgggagtgattatgggcagtctcgtcatttatcaaggaataccttgcaaactattagtagcagaggaagtatttcctactcgactacagattatctcgcccaatgatatctccaaagctatgcaaataggttttagctgttggggatatccaaatgaaatcatgaaagaagtcacacccgaagaactagaatgtttgcaacatttcgaacgatttccactgaattgaaaaaataggagaaaataatggcatttgaaagtttaaccgaacgtttacaaaacgtctttaaaaatcttcgtaagaaagggaaaatctctgaagcggatgtccaagaggcaaccaaagagattcgtctagccctcttagaggccgacgttgcccttcctgttgtaaaagacttcatcaaacgggtccgcgaacgggctgtagggcatgaagtcatcgaaaccctcaaccctgcccaacaaatcgtgaagattgttgatgaagaattgacagcgattttaggttcagaaacagcagaaattatcaaatctccaaagattccaaccattattatgatggtcggtcttcaaggggctggtaaaacaacctttgcggggaaattagctaacaaattggtcaaggaagaaaacgcacgtcctttgatgattgcggccgatatttatcgtccagcagccattgaccagttgaagacccttggtcaacagatcaatgtccctgtcttctcacttggtacagaggtccctgcagtagagatcgttcgtcaaggtttggagcaggcgagagccaaccacaatgactatgtcttgatcgatacggctggtcgtctgcaaatcgatgaaaaactcatgggtgagttgcgcgacgtcaaagctcttgctgagccaaatgaaatcctcttggttgtggatgctatgattggtcaagaagcggccaatgtggcgcgtgagttcaatgaacaactcgaagtaaccggggtcatcttgaccaagatcgatggggatacccgtggtggtgcagccctttctgttcgtcagattactgggaagccaatcaagttcactggtactggtgaaaaaatcaccgatatcgaaaccttccacccagaccgtatgtctggtcggatcctcggtatgggggatatgctgacgctgatcgagaaggcttctcaagaatacgatgagaaacgctctcttgaactcgctgaaaaaatgcgggaaaataccttcgatttcaatgacttcatcgatcaattagaccaagttcaaaacatgggaccaatggaagatctgctcaagatgcttccagggatggccaacaatccagccatgaagaacctcaaggtagacgaacgagaaattgctcgcaaacgtgcaattgtatcatccatgaccccagctgaacgggaaaatccagatctcttgaatccaagccgtcgacgtcggattgctgctggatcagggaacacctttgtcgaagtcaataaattcatcaaggactttaaccaagccaagcagatgatgcaaggtgtcctctctggcgatatgaacaagatgatgaaacaaatggggctcaatccaaataatatgccgaaaaacatgcctggtggaatgccagatatgtctgccctcgaaggcatgatgggacaaggtggcatgcctgacttgtcagctcttggtggaggcgctggaatgcctgatatgagccaaatgtttggtggtggtctcaaaggaaaagccggtgaatttatgatgaaacgggcgatgaataagatggccaaacaaatgcgaaaaaataagaaaaaacggaaataatcgtttctaataagggcctggaacacagtgttctgggttcttttagaaactactactagaggaaagatgttaaaaaaactatttcaacaagtcattcgtttctttgcaagattgttttcttcgcacaacaagccctttgaattcccaaaaggatcgaagaaaccaccgatcagaccgatcatctttgtacctgggagttcagctagtatacagcgattcaatggaaccattcgcatgctccatcgcttttctagaaaaaagcaaagtcttttaaaaataaaagtcaacaaagatgattctatagagatggagggaagactgaatacgaaagagccgaatccgatgattgtgattggcttcgagaacaatcgagacggctacagcaatatcaagcagcaaatcgaatcccttaagattgctctaacctatcttcttgatcactattattttacagagttcaaggcagttgggcactccaatggtggactagttttgactggtttattggaaagtggctttttagagaaaaagaaggtaaccgtcagcaagttggctattattggcagtccttaccaattcaatcaagaaatgtttgacgattttcaaacatggaagcatcgcctgggaaaagaagtagaagtccttaattttgtcggtagctttgctggaaaatcagatggcatcgtccctctttctagcgcacaagcagcacaatctatttttgacaatcaaacctatacagaagtgaatttaaatggtcgtaaggctcatcattcagctttacccactaatccagatctagtaaaacaattaagtctgtttttgaatctataattaaattacataatttcggttatgtaatttttattcgtctcttgcaatccttaggtaaatatggtacatttttggtagcgattacacatacctaaggaggattttatgaaagatcctaaattactagagacaatgaaagcatacaagggacgagatgacgttcctgttgattttgatagcttttggaatcaagccctagcaaagatgactgaactgccagaatacaagctcgaagaacgagatttcagcattccaaatgtgatttgttatgaattaacctttaaaggaaccagaaatggccttgtctattcaagaatgatcctcccaaaaacggatcaaaaggttcccgttgttttccattttcacggctatatgggccgttgttgggattggtccgacatgctggcttatacagtagctggctatggtgttgtatctatggacgtaagagggcaatcaggctattcaacggacggagatcgctcaccacttgggaatacggtaaaaggacagattatccgtggagccgtggaaggtccggaccagctcttttataaagatatctacttagacctttaccagttaattgaaattgtagccaaccttcctcaagtagatgacagcaaacttgccagctacggagcctctcaaggtggtgccctggctttagttgctgctggattaaatccccgaatccaacgaacagtcgccatttacccattcttatcggatttcagacgggtattagagattggaaataccagtgaggcttatgacgagcttttccgttatttcaagtttcatgatccattccatgagaccgaagatcgtttgatgcagactttggcctatattgatgtaaaaaactttgcccatcgcatcaaaggacaagttcacatgattaccggtctagatgatgatgtctgttatcctgtgacacagtttgccatttataatcgattagaatgtccaaaagagcatttaatcatgccagaatatgcccacgaagctatgaacgttcaagtcaatgatagagtctataattggatctgtggtagcaagattccatttagatatgtagaaaaataaattatagaagaaaacaatcagtaaatccatgaggtttgctgattttattgtgtttaaaagggatctagaatagaaaggaaaactaaaagtttatgtacaattgactaaacaagacttaaaccattgatataactgaattagaagcataaagtacattatttaaaaagtgtactttatttttgttttgtacattattttggagtggtattttgtatgttttgtagtacgtaatattctctaatctaagaaattgatttgtacattttttactctaattggtgtagaagaagtggtggttcaattgtacattttatttaaaatatttatggttataagattagtatttgaagcataaataaagtagatacagtggtataatagtgtcaaaagactttcaggagaaatgagatgagatcgcatacagttattctaggcgctggtgctactattgcagcaataccagatggtgataaaaacggcaaaagttcttcagttatgaatggattgctaaaaaaactaaatttagaagaaattcttgctggtgttgaattacagacaaagagcgaaaatttagaggatatctactcagaattatttgagagagaagagtgctccgaaatagttagaaagctagaagaaagactctatgattattttgcttcgttggagttacctgatgaaccaacaatttatgattttttaatattaagtttaactaataaagattgtatagctacgtttaattgggaccctttacttatacaggcttatattcgctgctcaaaaattactctgaacttgccaaaaattctttgtttacatgggaatgtagctgttgggttttgtgaagaacatattgagtttggaggagtagattgctactgcccaacatgttataaaaaattaaatccaacaaaattattgtatcccgtaaaaaacaaagactattcttccgatggatacataaattggtgttggaaagcattagattactttgtcgatcattcatatatgttaactatttttggatacagtgctcctaagagcgatgtagatgctgttaatttaatgaaaaaagcatggggaaatattgaagaccgaccacttgaagaagtttccgtaatagatattatagacgaagagactatgctaaatacatggaaagactttattcatagccatcattataggtattcaaattcattttttgattcttacttagcaaaatttccaagaagaacttgtgaaaccgtatttgcaacattttcattaaatgttccttctgatggtagtagaggatttaaagagaattttaattgggacatgataaaagagtttttatctgatatgttagttgaagaacaggaaaataaaggaaaatcaaatttaaaatcgaaatatttagtttggggtgaagatgttaacaaataatccaattaatcatagtgtacttaaattgtcaatggatttcgataatgcttttaaacataaaaatataaaggaaatccatagactaatagaatttggaaaaaatatggaaaacactattgatgatatttccaaaattcaattattttattctattgggacagcatacgctgatatatttgaactaagtgataacttagttttcaacatagataccgattttacagttcaacaaatttattactttagaaaagctatagaaatttcaaataaagttgatataaattctgagaacagtaggtttgttttcccattattatgttcactttacactaattacgcaaatttattagatgcttgtggtagaaagcagttagctattaagatgtattgtaaatgtatacaaatcaatccaagattcacaatggctagtggtaacttagctatttgtctagatcattatcgtaattttttgaatgataacgaacacctccactttattaaaaaaattaaaaatttaatagaaacaagcataactgtttcagatccaaacagagttgattatgcagaaaagcgatttattgaactttacgaacaatatcttgattataaagatatagatgaatgttcttgtaaaacaatcgattataatcctaattcacaaaagtatcgtgaatggtgttggaacaacgggctgtatcttaatccacttaatgacttacaagctgacgatataaatagatatgatgataatcttttactaccaagtttattatttcaatcggataaagatttaaacaaatatatttctatgtttaatcaaattaagcaagaatatgtttatgcccgttatctctgttttaatagcattgagagtgattcggttcattatgctgacgagaatgttgatcttattgattgtctagactacgtacaatactctatccgagttgaaggattaaaagcatcttttaaaacactatattcattattagataaagtagctatgtttataaatgaatattattctttaaaaattgaaactcgaaaagtaaatttccattcaatttggagatcaaatagtgatttaaataaaatgttggataagaatattggtctgtcatctatattttggatagagaaagattttgataatggtgataattctttaacagctaatccaaactcaaagcgattgaaaattattagaaattatttagagcatagatttactaatataacattgaatatttttaatggaagtgaagataatgaagataataatgaaaccagactgtatctaactgaatctgaacttcaagagtttgcattagatttattaaatcttgtaagagaagttattttttcactcaaaaatgccattcaaataagtgaaaatgaaaaacaatctactctaagcagtgaagttgctttaattccgataaattatgaagaagtagatttggaagataaattatagcattgagcatacaatttatagtcgttataaaaagcaatagtctaaattcatttaactaatcgacttaactagagttaaaccattgataaaactgaattagaaggataaagtacactcattaagcagtgtactttatttttgttttgtacattatttgttgattgcttaatcaatactacatctctatcaggcaattcagactccatttagtcctctaaaacccatgttgaggcggtaagtttgctagtcaaggagtaaaacgacgaagattagcatttacttccgcccatgcgatagctgtccgtgattgacaagtgctagcacgcagacagaacggagatagcgaaccgctgagtgtgtcgctctgctcgtaaaagcttagaaacctttgaacgaaagggataatgaaagccttgattgcaaggctttttgctttatggtgggtaagtatcagagtgagaaaatttttggaatgagtagaagtgatagctagaaattatcagtttctatttccatttaccctgtgggtacgtgtttgtttccattgacaaggagtttgtgggaatagaaatgtacccaccttgtttgaatcaagtgaagtgtagttgaaggaaatctgttgaaagcaatacttcattttaccgaataagtaataatttaggcaacttcaaatcgattaaaaaaaactattttaaaggttaagagtagacaaaaattgtccactcttttttgcaaactcaatttatcaataaatgaaatgagggaatgtaaaatgaaatattttgaggttgagttagaaaatcctgatgaatttttaaaactacaaacagaagattttgtgaaagctaatcgcttgctactaaggaagataatccagagcgttacagtctatgaagaaaacttcgtcatatcctttaaatctggcatcgaattggaagtatgagtctcattccataacttttatattgaacatatcatcttgttgtgttatactataaattgatataaacaaagatgtaggaggaaccgaaactatgacagcctcaatgcgtttaagataagctggcaataaaaaaagcagaatctatacccgatgataggcttttttgttgtgcttatttatacgatattgagcattcattagttacggtgaggatattggttatttaactatacctttatttaactatgtctttaatatgaatgtttccaaattgtatgtatgcagaccaaaagccacattgtggggtttggcctgcattttttattgcctagaatgctattcaaaatagaaattcaagcaaaataatatgcaggagataatataaatggaaaaatacaacaattggaaacgaaaattttatgcaatatgggcagggcaagcagtatcattaatcactagtgccatcctgcaaatggcgattattttttaccttacagaaaaaacaggatctgcgatggtcttgtctatggcttcattagtaggttttttaccctatgcgattttgggacctgccattggtgtgctagtggatcgtcatgataggaagaagataatgattggtgccgatttaattatcgcagcagctggtgcagtgcttgctattgttgcattctgtatggagctacctgtctggatgattatgatagtattgtttatccgtagcattggaacagcttttcataccccagcactcaatgcggttacaccacttttagtaccagaagaacagctaacgaaatgcgcaggctatagtcagtctttgcagtctataagctatattgttagtccggcagttgcagcactcttatactccgtttgggatttaaatgctattattgccatcgacgtattgggtgctgtgattgcatctattacggtagcaattgtacgtatacctaagctgggtaatcaagtgcaaagtttagaaccaaatttcataagggagatgaaagaaggagttgtggttctgagacaaaacaaaggattgtttgccttattactcttaggaacactatatacttttgtttatatgccaatcaatgcactatttcctttaataagcatggaacactttaatggaacgcctgtgcatatttctattacggaaatttcctttgcatttgggatgctagcaggaggcttattattaggaagattagggggcttcgaaaagcatgtattactaataacaagttcattttttataatggggaccagtttagccgtttcgggaatacttcctccaaatggatttgtaatattcgtagtttgctgtgcaataatggggctttcggtgccattttatagcggtgtgcaaacagctctttttcaggagaaaattaagcctgaatatttaggacgtgtattttctttgatcggaagtatcatgtcacttgctatgccaattgggttaattctttctggattctttgctgataaaatcggtgtaaatcattggtttttactatcaggtattttaattattggcattgctatagtttgccaaatgataactgaggttagaaaattagatttaaaataaacaatattggaggaatatttatgtatcttattttcatgtaactcttcctgctaaaatcgcagggttttccctgcatacaagcaaatgaaagcatgcgattatagacaggaggaaatgttatggaattaatattaaaagcaaaagacattcgtgtggaattcaaaggacgcgatgttttagatataaatgaattagaagtatatgattatgaccgtattggtttagtaggagcaaatggtgctggaaaaagcactttactcagggtacttttaggagaattaactcccccaggatgtaaaatgaatcgtctgggtgaacttgcctatattccccagttggacgaagtaactctgcaggaggaaaaagattttgcacttgtaggcaagctaggtgttgagcaattaaatatacagactatgagcggtggtgaagaaacaaggcttaaaatagcacaggccttatcggcacaggttcatggtattttagcggatgaacctacgagccatttagaccgtgaaggaattgattttctaataggacagctaaaatattttacaggtgcactgttagttattagccatgaccgctattttcttgatgaaatagtagataaaatatgggaactgaaagatggcaaaatcactgagtattggggaaactattctgattatcttcgtcagaaagaggaagaacgtaagagccaagctgcagaatacgaacaatttattgcggaacgtgcccgattggaaagggctgcggaggaaaagcgaaaacaggctcgtaaaatagaacagaaggcaaaaggttcttcaaagaaaaaaagtactgaagacggagggcgtttagctcatcaaaaatcaataggaagtaaggaaaaaaagatgtataatgctgctaaaaccctagagcacaggattgcggccttaggaaaagtagaagctccggaaggcattcgcagaattcgtttcaggcaaagtaaagcattggagctccataatccataccctatagtcggtgcagaaattaataaagtatttggggataaggctctgtttgaaaatgcatcttttcaaattccgttaggagcaaaagtggcgttaactggtggtaatggaatcggaaaaacaactttaatccaaatgatcttaaaccatgaagaaggaatttctatttcgcctaaggcaaaaataggttactttgcacagaatggttacaagtacaacagtaatcagaatgttatggagtttatgcagaaggattgtgactacaatatatcagaaattcgttcagtgctagcatctatggggttcaaacagaacgatattggaaaaagtttatctgttttaagcggtggagaaattataaaattgttgcttgctaaaatgctcatgggtagatataacatcctaataatggatgaacccagtaacttccttgacataccaagtttagaggctttggaaatactaatgaaggagtacaccggaactatcgtgtttatcacccacgataaacgattactcgaaaatgtagcagatgtagtttatgaaattagagataagaaaataaatctgaaacattaaatttaaggtagtcgctggtcagtatagtctgttctggttggcgactccattgttaaagagtataaagactttagattttatgaatattaaaaataggaacagtcaattgaactgctcctatttttctgctaaattaaatatattgtagttttcttatatgtataatgatagattagcggattctcatctacggtacttacttcaaatatgaagaagtgatcgcggttatctctggacttttccttattgaggacaaagtaattcttacgtgaagtcgccattgtttttaggatatcatcagttaggaaggtcaatggaatattcatgttagagtagcggtagaagtcacgttcaaaatcttggtagctctcgctataatagtccatttgtaggtgattacgctgaaactcaagctgattcatagagcacctcctcgacaagttcaatactaataatgtcttttaatttcaaattgatgtgacctgttgtagtttttatcaaaatgaaatctttggtcagacttggtattgttccagtgtaggaaacacgcttgtttttttcaatcacttgaatgcgtgtgcgtagctgcccggcgtatacttgactgaggagtaataatttcttctctagtgataagtcagacatgtacgttactttgtttgtatcatcagagagtgctgatgcatgttcagataggaaaaagcccatccatttttgcatctttgtatcctggtactctcttgctgattgaaatggtaaatatgaacggtcaatcatatcaaatcctttctatgcagaggcaagggtatttttatcaaattgaatcgtaaaaccttgaattcccccacctgtgtaacattctttaaagcgattgattacctcagtatagattatcacagatgagcttgttggcttaatgctaaatgtaaattccaatggtaatcggttttcagatttagcatgtactagtcgtatcgatatttcagttgttttgagttttctctgacgaagttttgaagttgctgtttcaacgattccatgtaaaaatctttcaagcatttcaatatcattacatcctttgctacggatttctgaaaattgtactgtatttttttcttgtttcattttaatccctccaatccacccgcggaatgaccaccgataagtttactgcgttcaatatttctggaaccttcagttaggacggttcctttttgtatggctaaaaaaccaaactgttctctgacaacatcaatagctgtctgaagtctattatctttttcaatttgttctacatcatcaaagagtgatagtagagtatagctttcatctacgaagccactataagatacaccaatttgtctcactgcaccagaggtgtattttttcggaataatacaagtacatgactcaccattgttttggggagatttgcgggttcaattttattctgagcatttatagattttttcatctcagtcctagaatagccaatatgaatagaaacgacagtagtcaatactagggctactgttccgttccacagtatcatttaaaaatcattttcacaccctttcgtctattagtatagaagaaagctctcagcacatgttgaggcagcatcactgcttgtacgagcttagaaaaaatgttaacgaaaaagccttagtgtcaaggtttttttggtatcctcaaaaaggtaattttataattgacaatttgtcagtagagtagtataatttataagcaggaggaataaaatgcgagatgtaaaagatccggaaattcgacgggctgagattatggacgctgctatgctcctctttatggagaaaggatatgcgaacacaacaactcaggatatagtcgataaggtaaatatatcacgaggtttgctatactatcactttaagaataaagaagatattctgtattgtctcgtggaacgttattcagagaaattattgagtgttattcacgtgattgtctatgatgatgacaaaactgctattgaaaaaataagagcctttatagatgccacaataatctctacagataacgtttcagcggaaggaactgagttacaaaagacggttgatcttgaagaaaatcgttatatgttagataagttatctcataagctcattgaaaaactgactatatattttgagaggataataaatcaaggcatctcagaaaaagtattttctgtaaaatatccatcagaaacagcagaatttctgatgacagcctatgtttttgtttcaaataacataggtataaaaacttcaaagaaagaaactgtcaaagattacttgaatgcatttaagataatgctggaacaaaatctaaatacaaaaggactctttagcaattaaaaaagatagaatgtttgtaaagagaactatgtaccgatagctaaatcaaaacaagctatcggtattatttcaaaatatgactgacaaattgtcaatagaggtgaaaatatgttagagataaagaattttagtaaaagttatggggacaagaaggttgtggataacctatctatttcagtacagcctggagatatttatggttttattggagcaaatggtgcaggcaaaacgacaacgataaaggcagttgtcggtatccatgattttgaagacggaagtataattatcaacggtcattctattaaagaagaacctgttatttgtaaaaaaatgatggcgtatatcccagataatccagatttgtatgaacatatgacaggacttcaatatattaattttattgctgacttgtttgaaattcctacaaaaatacgcaaggagagaatacaaaaatacggtgatttatttgatatgactgatcatctttcggggataatttcttcatattcacatggaatgaagcaacgaacagccattatttctgcacttgtacattctcccaaactgttgattttagatgaaccttttgttgggctagatcccaaagcaactttcctactaaagaaaattatgcatgagtgtgtttcagatggaggtgctattttcttttcaacccatgtattggatgttgcggaaaaattatgtaataagattgccattatcaaaaatggaaagttaattgcaagtggcaatacaggagacgtcaaaggtgatgaatcattggaggcatttttcatggaggtgcagaacaatgagtaacatttggatactgcttaaagcgcaattgattaatttctttcctattaacgtgattagagattcacgaaataaaaaacaaagttcaatggctattgcgagttttggcataataactctttccttattttgctttgtttataatataataacagcgaaaacattggtacacgtcggacagcagaacttgattccagcatatatggtctctgtctcaagtttttcaatattatttttgacagtattttattcgaatggcattttatttggcagtcgagatatggaaattctccaatccttacctgttaaaagttcgtatattatcaccagcaagttcatgtttatgtacttattgaattttttaataggcttgatgtttatgcttccgggtggaattatatggggcttgaacggaagtttaaacctcctacagattatattgtattttacttctataatttttgcccctttgatccccatgtgtatagcggcatgcatgggactcgttattgttgtcgcttcatctttttttaaaagaaaaaatgttatctctcttattttttcatttgcgatgctaggtataattggatattttgcattatcagctttgcaatcaggtgatgaaagtagtattggggttactctggctaagcaaattactggactgtatccaatttctagactatttatgtcatactacaattttccaatgtactatgggatgggattttatatagttctttcaatagtcgtcttttatctatttgtcaaaattgcttcgttgaagtatggactacttaatacacttgccaatacaaaatcaagttatgctaatgacaaagtatcttatgaaagaaaatcggtatttttttccttgtatcaaaaagagcttggacgatttttaagttcttatatggcagtcttgaatgctgggcttggagtgattcttttatgtgtctttagtatatgtttcctgtttaattctgtaggtcaaataggaaattctgcaggaattgaaaatataaatgagtatctttcaaacttagctcccgtctttattgcatctatgctttcactcagttgtccagcagcttcatctatatctttagaaggtaaaaatatttggattttgaaaagttctccagttgaagtgaaaacgattttaaatgctaagatagctgtcaaccttacacttcatttgattggatatatgatttctgtatctgtatttatgctgaaacttgatatgaatcctattcaagttatgaatctagttattgttcctatatgttactccctttttataatggtaatcggaatttcattaaataaaaaatatcctaactatgattgggacagtgagatgatagttgtcaaacaaagtcttcctgttattgtaactggaattattagtatgattacgcttattacgcctattttgcttaattggttttttaatcttccgattatatttgttttgcaagcagtatcagtaattttactggctatttcgtttagagtttatataaaaatgaccaagttaaattttatctagttaaaggaggaaaataagatgaaaaatagactgttaaaagatattttggttttgttgggaatgatggtcatcatagtcattatttgtgggtttctccctgagacagttcctattcatttcaatgcaaaaggagtagcagatatgtttgcaaataaatactatcttctactagctacagtcatcccttattctgcatattggaagtttgttagggaaagtgataataaaaagattaaatgaaacaccatctatatttacaaattgcatcaaaattaagaacgactattttaagaggtgattatgcacctgaacaacaaattccttcaataaggagattagcagaaaacgagaagtgtaatccggcaactgtccaaaaagcaatgaaagttctcgaagaacagaatttggttactagctgtggaacattaggatattttgtcatagcaagcgagcaagaaataaaagagataagatatcaagaatctaacaagctagttaaaattttgtttgaaaaacttagtgagctaggcttttcagaagatgagattgtcaatttattttttagaaaagatgcttagaagaagttgaatggaaatttattaggattatttgtgaaagtatagaaaagccttgattttaaggcttttttcattttccaataaagaacttgacattattagttacttccacttcttcaagtaatcctgaagaatagacgacaactttaaaatcaaataagctaaaaatgctctaaaatcattaaattgatattaaagtatttttttgtcaaaataaacaattgaaaaaatttccagtttttttaaaatcactgtctcagatgacaattcaatcaaaatatgatataatacagaaaaagtaaaaataacaaaagtaacttaccaaagtaaaagaaaaaaagtaaatagatagccacggtggatattcctttcattgtttagaaggagttgctgtggttatcgttgttgctgagctaattaattgctcttattacttagatgaagttacttttattattgaattaatttaaataataataacgatcaatgaaagtactcatcgatattccctttatgcagtttagagcacaaaggaaaatggtactgatttgatcgtttttttgtgtattgacatcataaaacacagtcagaaccttcagtcataataaacaaggagataacatgagatttgttgtatataaacattcgctaattctaggcgataataatatcgttacaaagcaattgattgcactcaaacatgatgatggtacattacaattcactgattttcatagatatgtaaaatctgccacaaagattaaatctatttcagacgatggaaacaaacgattttcatacgttgttaagtttttgaattttatatacggaacagttggggttaacaatcttgatcaactaactttagaaatggtcaaggagttttttatgctttatggtttaggacaacttccagaagatagaaaaaatagaaagaaaagtacagtcgaaaaatgtgtaaatgcagttcttgattttttaactctatacttgaatgaacgaaaaggaaaggttaaattgaagccaaaagacctttattctatcaatacgtttaccaatagacgaggcagagtcatcaaaagaaaagagttgaattttgaggtatttgttgatggaagcaacacacagaagtcaatttttagggatatgccaaacagcgcctttgaaatgctttttgctcacattgctcaatatcacaaggatttacttatggttgttgctttgggagcatttgttggtttaagaccatcagaagcttgtaatgtaaggcgtgaagatagccctttgggggcaggtatcatatttcaccaaagtgataatcaagtatttaaaattgagattgatctgcgaaaagaaatgccccttagaagcgatttaaagccaactggacgaattaaaaaggaaagacttcaagctgtaccttatatcttcttagaggtctttttagacacctacaatgactatatgagctacctagaaggtaaaaggtatgagagagattatggtccattaagccttaacaagcaagggaaagcattgtcatacgatgtgtactatcaacgatttcgtaagattattcgcgaagaaatgattccaatatttcttaaatctgatgacccagaggttgtcttttttggtcaactcttgcaagaaaataatatttcaccccatatctttaggcactggtacaccacacaattggttttgtcaggtgttaatgaagttagtgaactgatgtctgctagaggggacaattcaccagaaagtgcttgggtttatttacaaaataaaggagaaattgcaaaacaatatggtcaggttaataatggtgtttttgaatatatgaactggcaagcagaaaaattgtttggagaagattaaaaggagtagctattggtagtagatttaaaaaattatcttgaaagaatattagtcgagttaggtgctgctacaataaaacaccgtgagaaagtcagtggattcttactagacaatgaatggtttggtgtgtctataaatcttgatgattatactatttcttaaaaagatgctgaagttcttaaaaatcacatcaaagactatctaacaacacctcctggaattaagagtatggaaggaatcttttcaaaaaaatttccttctacaagtgaattattcgtacaatttgctgaagaagaaaagctgagtgaaacaaatcgtttctatctacttgattttttagcatactacttaacaaaagatttgtttctatatagtgatgctgaagtagagaccttagtagaagtagcaacagaagttcttacgaagtcacaaggcaatatcctcattcaatttattaaatggctactcaataaaggcgttactcgttatcgagtaagttttgaaatgacaaagcgttacacgattgagagtgcaaatggagcgtatgaattagatgaataccttgaattaatgtactacctattcaacgaaaactacatcataaaaaatgatatgttgtgtaaagcagcaaattcaaaaaactatgcagatacatggttgtatctagggttacattttatttgcgcactaagatcaacagacttagaaagattaggacatcctaaattaacaagagaaccattagaagttttagaagcagtagtagatggaacttggagtagtagtgaagctagaaggactttactaagtattacaacaagattgacttatttaaacttaacacctaataaaaccaaaaacgcttctaatgttgctcagttaaagtttcatgtcccagaaagttgtcaggttcttattggaacgttattggctatctgtgaggcacatttccaacttcaaataccatacaatgcagaaaatccattgatcagacaaattaaaacttatgaaaagattactagttatatgggggaggaaatcggaaatttatttttagagcgtaactttagtagtcgttctgcaaacaagtcctacttacaatctgtcgcaatgttagcagatgatgttcttgaagaaaagtcagaactgaatattaaaggttattttctagcagcattagctcgtagccataaaggagattttaatgaatttgcacaaactacaacaacgtatctaaaagatgcccaactcggacaactaaaacctgaaatggttgcaaaagagctatttgaacgaggcgtattatccatgattccgtctatgctcttgaccattgtaactagaggaaagtataaaaaattaagtccaagccaacaaactcaaatgattaaaagtttagatttaacgccaattgaaattgaaaaaacgttggaattgagtattagggctgattcacgttcgcaacaagcattaaaaactctagttgaaaataatgttgatcctgaacaattactgacgatctgtcatcgaattggtaacggagaagctttttctaagcaaggagagagtatgtgtcttttatctgcactagggaaactatgttcctatgatgaccgtcagcattgcgtcggctgtcagtatgaattacaaacaaaatctaccttgcttttgttaattggtgagtttaatcgactcaataaacaatatcaaaaattaaagaatgaacttgaacgaggaaaggttcgagccattcttgagaagcagattaaaccatgtcttacagaaatgttgcaagctttatcagaacagtatggcgaagctgtattgtctgattatgaggatattattaaggagttagtcagttgaataatcaatcaaaattatttcgtaaagtaaatgaaattatcctgtttgatgacaatatgattgagagcgcaaaagaatgttttcaagactatgttgaaaaagggattattctaaccaccaattttgaagaaaataaatgggaaacgactaatgaatattctaacgttagcttcatttttaacttgaataaattccaatataaaaggttttatgaacaagtatttcaattatcttttgatgattttgttacctacttaaagagttttatagtgctatctatggaacatcatgttttaatcactctccaagcctttttaagagatataaagaaattagtcaaagaactaaaagtgaacgaagtcttctcattagcaaatatgaagatttccaacccctcagtatgtatagattttctttctacactaccatgtttagagagtaacgaattaacccaactgattgagcaactagatgaacttttaaatgttagttatcaactgaacactaaaaaacagcgaaagttagcccaatttcaatcctattttttatttaatgatattttaaacgactattgggttaaatcattatcagatgaggaaagattgttttactaccctctttacttatggtggcaaataacagcagtagtaccacttagaccaagggagtttttgctcactcagagaaattgtctcacagaaaaagacggaaaatattacttaactctcagacgaaataacttaaaaggaaaagacaagggagtatcccataaaatttcagaggattattatttaacaacttacgaagtaccatttaagcttgcgagtgagattttaaattatttagagctaaccaaagacttatcatctacacagttagataccctatttgtgacagactctcattatcggaaatggaaacgtattgctagtactaaaaaccgtttcttgacgtacagtaacttaaatacaattttaaaatatttctttaatgagattgtatctcaacagtatgggtattttgtccatcatatcaattccccaaatcaattagacgatcatgagattaatttcattcatattggagatactagacacattgcaatgatcaatctgatagcagaaggagctagtccagtaacagcaatgctcttagctggacatgatagtatcacaacatcttcacattatttttcaaatctgagtcagtttattgaatgtaggagctatcagctttatcgtaaattaacaaactctcaaacgtcttacgctataagtaaaactcaacataaatacaccattaataaaaactatgttcctcttgataataagggcagatgttattcacctcgatttgcggaaggtgattattcagactgtcttaaagtcattagctcacatgcagagcttggtgcttgtactagttgtccattttacagaaaagctggaaaagattatttctctatggataaatcctttaagaaatcaatcgacgaggaagctttaattgtagatgaggctataaaaagagttcgacaaggaaaggggaatatagaagatattggtgaggcgttattaaaacttaaaacagttagtcattcttatcaagaatatctaactgaaaaacatttatccttacaggagttctcaaatggcgagaaagaaatatattgataatcaagaattgctattattatttgaacattatttactggaacattgttcgaataatcctagactattcaaaattccacagtttggaaattaccttagaagcaacggatttccgcaggttgcagacacaacgattagaagaaacaaagaatttagacaaacccttaatgatagattggaactatttgaagacgacacttatcaaacagttataacgtataaaactctagatgtagaacgtttcttaataaccaatagaacccctaaagcaatcaaatcagcattgatggaacttaacaattattataaaagagttgttgatgcagcaatagaatataaggaagaagccagtaagctcaaaacaagagtttcagagttgaaaaatgaggtagcacaacttaatgaaaagaatgctgaaataaaggagcagacagcgttaaacaaagaattattagaggaaaacaaaaagttaaggaatcttcttaaaactagtttgtatcctgatattgcgaatgaattgttaaaagaagagggcttgttaaaatctgatcagcaactagtaactaagaagtatcttagtgagaatgttattacttcagacacaaaaatatcttttgaaaaacatactcatactgaaaagcaaacaagcaaaagtaagattttggaaataaaagacttactggataataagactaagtattaggaggagaaaatgtcagacttaatcactgattttccagccttattgaactattgggactttgacaagaatatcaaaatagatgtagaaaaaataacaattaccagtaaaaaacacattaactggaaatgtcctacctgttcttatgaatggaaagcaagtacatcaaaatcttataagaatattcaaaatcattcaaaaatctgtccagtatgtgagcttggaaaagtgttcataaaaggggaaaactctatatctgcaaggattcctaactttctaaggtacataaactttcattatgaaaatatagaaaccattcaggaagagattgataatttatctttttcttcaaagaggttatttcacttcaaatgtcctacctgtcatgttggttggaaagatgtagcaaacacttctaaattaatcaataaacataatcaagagcttgttcatgttggatgtaatgaaagtacacattttgtaccttacactaaagcataccctaatcttcggaaaatttatcttccaggggagcaaaacaatgtagagtttaatgatttgaagttaaatgacaatgttacaatccctagaaattggaaatgcgacaaatgtgaccatatctttaagttgtctattgatcggctaatttcaagaatcaaaagagatggtttctattgtaataactgtaaagcaacatttgataccgtaattaaagtgaaagccaaccccctattgcatacagatagaaatctttttaagcaatttattccaactcttgtaaaaagtaatatgattgatagcttatccgacatcttagtaagatggcagtgttttaagtgttatggtcaatatgactgtagtgttgttaaaaggcatctcgaaggctgcccttattgtgatgataagttgatgttaaaagggtataatactttacaagaaactcatccttatttagagaaattttgggataaaagtaatgataaatctatttctgaatactggcataagtcttctgaatgtataaattggatatgtccttgttgcaatgtcaattttcattgcagtcctaatgaaatgatttcaagaaccgacttagagaatagtaattttcaaacttgtcctaatcattgtgattgggatacacttgtttttaacaatgatatactctataatttcccaaaattacaggaagaatggagcgataaaaatggattgcctgttcatttagcattgagccacattgaaacaaaaaaatattggtggaagtgttctgtttgtcaaggtgaatacctttgttcaattccaataagaaaagaagttatagatagctgtccatattgtaatgatgaacaagcattaaaaggttataatacaattgcagatacttatcctgagttgtgtgacctttggagtagcaagaatgtagaaaaacctgatgaggtgacgaaatcgtcagaaaccgagaataaaatatttaattggatttgtgattgttgtgatttagaatttcaggagagattagggattgttctaggtgtgtttacaaacaataattctaatagtctcaattctatatgtccttactgtaataaaaaaattcctaaaccaaatgaaacactaagctatgttaaaccgtacttaaacaatgaatgggtaaaagaactgaatggtgatattgataccttcttttatgattcaaatgctttaaccaattggatttgtcgaaaatgtcacagaagttttaaagcaaaaatttctgatcgccacaaaaacgaccaatgttgtccatattgttcttttaagaagactgcaaaaggttataatgatcttgaaacaacacatccttggttaattaaagaatggtcatcattaaataaacaagaaatgtcttcagtaagggcaaattcaacatataatgcatggtggaaatgccctgtatgtactggagaatatcagaaaattattaaagaaaaattttacagagaaaattcttgtccatactgtagaaatcaaaaagtattaaaaggatttaacgatttagcaacaacgcaacaaagtctaatgaatgagtgggattatctaaataactccttgatagtaagtccaactgaaattacagagttgagtattctgcctgtatggtggatatgtcaagaaaatcttaatcaccgttacaaaattcaagtaaaagaaagaatggcatacaaaaaacgcaagaaaaggtcgtgttccatttgcaaaggccacagaagaaagcaagaacactttgtacagtttgaaaaaatatagataaataaaaacactctaaatttcattaaattgatattagagtgtttttttattgtcaaaatgtacatttgaaaattttttagttttcacttaaataaagtacattttcaactgaattgagagtagtaaaaaattccagtgttcacttaaataaagtacataattgagtataattggcttaaaaaatttttttggttatccttttgaaacgaaacagtcctatataaaccctacagcatctttccgaaaaactataattttcttgaaaaatatatctggctatgctatactactagtatagaaagatttggagtaaaacatgaaacgcgagatcttattagaacggattgataaactcaaacaagtcatgccctggtacgtattggaatattaccaatcgaaactggccgttccatacagttttacgaccttgtacgaatacttaaaggaatacgatcgattttttacctgggttttggaatctggtatatcggatgctgataccatggccgagatccctttagacgttctggagcacatgaccaaaaaagacatggaatcctttattctttacttacgtgaacgtcctctgctcaatgccaatacgacaaaaaacggggtttcccaaacaacgattaaccgcaccctttctgcactatctagtctctataaatacttgactgaggaagttgaaaatgagcaaggggaaccttatttctaccgtaatgtcatgaagaaggttgctaccaagaaaaagaaagaaaccttggcagcccgagctgaaaatattaaacaaaaactttttttaggtgatgaaacagaaggtttccttaactatatcgaccaggagtaccctcaaacactctcaaatcgcgccttatcttcctttaataagaataaagagcgagatttagccattatagcactccttcttgcctctggtgtccgtttatctgaggcggtcaacttggaccttcgtgacctcaatcttaagatgatggtgattgacgtcactcgaaaaggtggaaaacgagactcagtcaatgttgctgcttttgctaagccttatctagagcaatatcttgctattcgagacaaacggtacaagactgaaaagactgatacagctctctttctaaccttgtatcgaggtgttccaaaccgaattgatgcttctagtgttgaaaagatggtggccaagtattcagaggacttcaaagtccgcgtgacaccccataaactacgccatacattagcaacacgtctctatgatgcaaccaaatcacaggttttggtcagccaccagctgggacatgctagcacccaagttaccgacttgtacacgcatattgttaatgatgaacagaaaaatgccttggatagtttatgatactacataatataaattatgtaaatagtttttgtgttggaaaaagagcgtagatttttatatggaatcttacgctcttttattaattatataaacgtatgagaatctttataaatatgatcgatctgttttcttcatcagcctctacctcctgaatagctataaaagataatctagaagatcctaccatttttcaaccatggactagttgagccttatcacttcgtcagctttttcccaaatcactggattatgagttgcaataatgattaaacgatcttgattctttaacgttaagagcaagtccatcacctcttgtgaggtttctggatccagtgctgcagttagttcatctgccaaaattaaaggtggatcttttaagataactttagctaatgcaacacgttgtgcctcgccaccagataattcataaatcttttgatccagagcaagataagccaatcctacttttttgagcacttcttcttcttgctgcttcttctcttttttcgttaatttttgcccaatcaatcccaaatctaaatttttagcgatagtctcgttttcaagtaggccaaagttttgaaagagatagcctaattcatgcttaaagaagtgatgctgtttaatctgtttcagttcttgcccttgatagcttatactccctttttcataaggctctatcttcgccaagatattaagcaaggttgttttaccacacccactatttccgataagagcatagaccttaccttctgtaaattgcaagctcaaatcttgaaagaccgttcgttggccaaatgatttggttaaatgttctacgctaatcatattaggctcctttcagtacagtggctaacaagtggtcttctttatgagaccggtacaggagaatgaaccaagcattagtaataaatagaaagagagtgacaatagcaatccaccattcttgagtgagaaggaataccaggaggcttcctaatagtaagaggctactttctgagagcaaaatcatttggtgaatatttacaaatcccagacctgcaatcttcttcaagaagatttgttttctaaactcttcaaaatataggaaattcatagtgttaaaaagaagaacagaggttgctataccaaagactccacctgcaatcgccatgagattttctatttgtatggattgggccatttgctggtaaacgtccactgcatagtcgtactgactaacacttttttcaagatcatactcagcgactagcttcttactattctgaagcccattaaaataaaggtaggaatctaggtgggtgaaatatggattctcatagcctccaaaactttcaggttgtataaccactaaaacaggatctgtaaagaattgcttatagctgattggtgtgttgttgtagataaagcgtttttgatgattcggaatatacgttacctgcgccttcattgataaggtgatatttccttgatcatctcgaggagatagataatcttcatatcgtttgatcatctcctcttctcgaccttttaatttttccggaagtaacagaccaaattcccctgcttgtaagtgatttaagtgatctttttcttcaggagaaactggaacaccttggatttcgaggtaatttggagttacatagagagttcgtgcaagaggatcgtaatctgtgattgaaaactctttacctgtactaggatccgtcataactccttttggactaaaaaatacgaggtgatgataagctaaaagaccaccattttcaatgccagactcgatgagcttagaccattttgctctgttctcaatttgcgtctctttgtttgttttctgtgaaaaatcctcccgacttgtactaatttgaacccaattcgactgttttaaccaagcctcacttccctcttggtaagtttgccagacggatccataaatactgattcgatgaatcgcaaggccaattaatgccacagcgagaaattgacaaataaagaggaaaaccaatatgcacttcaatggaaccttcccttttaaaagggggactaaatgaatcgtttgaatactatatgcaaagaggaaggataagaaaacagacaaaattagtaaaatcccattgtaaatgatactactcgaaatgatgacggaataggcaaaaggtgttaattgaaaggaataaatcagaaccgcacccgttatacttgcgccaatacatcccaaaagcaactctatactatcatcttttagagaatgtccgaaaagttgcaagcgtctcattcctgaaatatatcgaatcccagcacttctcatttcttgtgttttttgaataatcgtaaaagagctaaaactaatgataaaaatgactaaggcaagtgattgtgaacctgagccaaaaaaggcaataaaggtcagcagaagattcggtttctcaataaaagtttgtgagaaaccaagagtatgaagcgtttgatccagcttttcagtttccaattcacctgttaatacataataattcgttagcaggctttctttggcagccagttctttcttctctcttttaatcccaagaggaagttttccctctccgtagatttcataggtgaaaacaacctgccccttagagtctgttctttgtatctgacgggcaattatactatgattttcccttgccaagcggtctaaactggaagataagtcttcatatgtgacgctcttatcttgtcttaccacacctactaccggaagactgcggtggataagcgtatttggagaaataaaggcaatccaaatcaaaaagctagagatgaaaaggtttgataaaataataaagacacgtttcatatcatcacactttctaaagcatcaaaggtaaatattattcagctaatcaatcaatttccttgtttagtgattgctgagtatttaaaattttatttatacttttgtaaacgaatacatttttccacctttactatactacaaaatccttcgtaaaacaataatttctatgtgaaactagtttcaaaaaagagatccgctatgaactgcaccccaaaagttagacagaaaaaatctaacttttggggtgttttataatgaaattaacttatgaagataaagttcaggtctatgaacttagaaaacaagggcgaagcttcaaagagctttcaaatatatttgggataaaaattcccaatcttcagtacatgattaaattgatggatcgttacggtatagagtttgttaaaaaggggaggaatcgttattattctcctaaattaaaacgagaaatcattgataaagttctgattgaaggtcgttcacaaataagggtgtctctagattatgctcttccaagtgttggaatgttgcctaattggatagcacaatataagaaaaacgggtatactattgttgagaaaacaagagggagaccgcctaaaatgggacgtaaaccaaagaaaaaacctgaagagatgacagagttagaacgtcttcaagcagaaaatgagtacctgagagcggagaatgctattctaaaaaagttgagagaactccgattgagggacgaaaagaagcaagaagaaaaacagaaattgttcaaggattggtaacagagtttcctttagatattcttctaaacattatcaaacttgctcgttcagcctattattaccacttaaagcaactgaatcaagtagataaagatcaagctatcaaagtggaaatacaagccatttatgatgaacataagggaaattacggctatcgtagagttactcttgaattaaggaatcgtggttttgtagtgaatcataagaaggttcaacgtctgatgaaggtccttggtttaagtgcacgtattcgtcgtaaacggaagtattcttcataccaaggagagattggaaagaaagcagataaccttattcaacgccaatttgaagcatccaaaccaatggaaaagtgctacacagatgtgacagagtttgccattccggcgagcagtcaaaaactctacttatcaccagttttagatggctttaatagcgaaattatcgcctataatctttctacttcgcccaacttagcacaagtgaaattaatgttggaacaagccttcacagaggagcattataaaaatacaattctccatagtgaccagggctggcaataccaacacgattcttatcatcgattcctagagagtaagggaattcaagcatccatgtcacgtaagggtaatagtccagacaatggtatgatggagtccttctttggcattcttaagtctgagatgttttatggttatgagaagacgtttcactcacttaagcaattggaacaagctattgtagactatattgattactacaacaacaaacgcattaaggtaaaactaaaaggatttagtcctgtgcaatacagaactaaatcctttggataaattaattgtctaactttttggggtcagtacactactgcgaatctcttttgactttattccaccaccgcttcagcaatttcctctgcagtgatacctgcaaaataacggcctagattaatggtttgaagggctttgaggacgtcttcacgttcgtatttgacaccacgaagaacatcttctactgctgcaacatcttcgataccgaagaagtcaccgtagatcttgatgtcttggattttggattcaatgacattagcgaagatttcaaccttaccgcttgggaatttagtgccacgacggatattgtattcaggagactttccatagttccaatcccaggtaccgaacttggtttccttgatacgattgatttcagccaattcttcatccgagaaaacatattctgtcatctcaggatattctttcttcatgtagtccaaaagcaagtcacggaactcttcaaccgtgattttttctggcaattcatcgatgatattggtcacacgtgcacgaaccgatttaacccctttagactcaaacttgtctttagagaccttgagagcattagcaaggacagacaaatcaacgtcaaagagaaggcaaccatggtgcatgatgcgtccgttgatataggcctgtgcattcccacagaatttcttaccgtcaatctctaagtcgttacggcctgtaaattcagccttaaccccaagttgagccaaggtgttgatcacgggagtcgagaagctcttgaaatcaaaggccttattttcatcttcttttgaaatgatagtgtagttaaggttgtttaaatcatggtaaacagccccaccaccactgatccgacgaacgacttcaatcccatgctcccgaacatagtcccggttaatttcttcgatggtattttggtgacgaccaacgataatcgatggtttgttaatccagagaaggaagatttgatcctcatccaacagatgcttaaaggcatactcttccaaagcaatattaaaagcagtatcatttgaataattaataatgtatttcataagattcctttatatacgatagagactggtccagcatttgctgcccagccattctatcatttcaaatattatttcttcttaggtgagtgaaccgccaagccaagtacatctgcaaaagcctcatacatcacttctgagaaggttgggtgaccatgaatggtcttgagcatttcttctacagtgatttccatctcaatgatggttgaagcttcgttgatcaattcagctgctgctggaccaatgatatgaaccccaagaacttcaccgtatttcttgtctgcaatgactttaacgaatccttgagccgcatctgatgcaatggcacgaccgttcgccgcaaagttaaacttaccaatttgaacatcgtatttctcacgagcttgttcttctgtcaaaccaacagctgcaacttctggaagggtgtagatggctgcaggagtcaagttcaatttagcaacagcatgatttcctttaagggcattttcagccgctacttcccccatacggaaggcagcgtgagccaacatcttcgtaccgttgatatcacctggcgcatagatacctggaacagacgtttccatgtattcattgaccttgatacgaccacggtctaattcaaattcaacttctccaattccatcaagatctggaacacgaccgattgaaagaagagctttgtttgcaatgatatcgtcttttccttcaaccttgatacggagtttaccatcttcttcaatgatttcttgcagtttagtatctgtcaagatagtcattcccttgcgctcaaggatcaaacgaaggttcttagaaacttccgcatccatggctggcacgatgcggtccatcatttcgatgaccgtaaccttagatccaaaggtcatgaaggcttgaccaagttcgataccgacaaccccaccaccaatgatcacaaggctttctgggacttcattcatatccaagatgtcatcactggtcatgacaagggaagactccataccaggaacgttaatcttgctgacttttgaaccaccagcaaggataatcttcttagtttcaagtaactcagaaccattgaccaaaacattcttatctttcgtaatggtaccgatacccttatagacatcaactccgtagcttcgaagaagtcctgcaacaccaccaacaagagtatttacgaccttgttcttagtttcaagaaccttgtccatatccactgtgaagctaggattgtcaatgatgatcccacggtttgccgcatgaccgatattttcaatgatttcagcgttgtgtaggtaagtcttagttgggatacatccgcggttcaagcaagttccaccaagttcagatttctcaacaagggcaaccttaccacccaattgagctgccttgatagcagatacgtaaccagcaggaccaccaccgatcactacgatatcataagcatcatcgctcttattgtcatcatttgaagcacttgctgcagctggcgctggactcgcttctggtgttgctgctccagctgttgggatgttttccccttcctcaccaagataaccaatcacttctgttacaggaacagtctcgccgtccccttttaagatagcaatcaagtagccatcttcttcagcttccaattccatgctgactttatctgtcatgatttcaaggagaatttctccttcttttacaaattcgccgacttttttattccactgaacgatttgtccttcggtcatatctacgccggcttttggcataattacttctaaggccattttatttccctctttttcttgtttctattctctctcgttgattagaccaacattgaaatcgggtcttcaatcaaggctttcaagtctttcatgaatttggcaccagccattccatcgacaacgcggtggtcaatggtcaagcccaagctcatgattggacgaatgacaatttcaccattcacaaccactggtttttcaaccgttgcactaacccctaggatagcagagtttggttggttgataatcggtccaaatgattgaacgccaaacattcctaagttactgatggtaaaggtagagttttgcaattcacttggagcaagcttaccatccaaggtacgtccgataacgtccttaaaggctacgaccaactcagacaaggtcatcttttcagcattgtatacaactggtgtcataagaccattatccatcccaacggccatcgccaaattgacataattgtgagtaatgatggttttgccatcttccgtcaatgacgcattgatatatgggtgtttcatcaaggtcttaaccactgctagagaaagcaaatctgttacagtgactttcttgccagtggcttccatgattggatccaataccttcttgcgaagggccaacatttgagacatatcgacgtcatagttcaatgtgaaggttggtgctgttaagtaagattccaccatccgttgagcgattaccttccgcattggtgtcatcggaatccgctcgatctcaccataaggtgtcacattatctggagcttcttccactttctcaatttgagcgggtgatttaatcgtatcgttttcgatattttcaggaaggaaggctaaaacatccttcttcataatcttaccacgatgaccagttccttggatttcttgccaagcaatattatgctctagtgcaattcgttttgcaagtggtgaaatgcgaaccacatttgtttctttataggtttccacgtcttctttgtggacacgaccgttggcgcctgaaccagaaacatcatagaggttgattccaagatcatccgctaattttctagccgcaggagtcgctcttagcttatcatcagccatgacctctcctattctattataagatattaaggacgtagaggacaaagaaaaaataggagattgacgctgtgttcgctgaacacaaggaaatctatctttttttcacagtcctcagtccggattcagttacaagatactaagggcgtttaaaagcgaccgaaaaatagaaaatcaacgcagacttcgatgaagtcaaggagatttattttttttccgagcttttagcccgtgctctaatctaagatattaaggacgcagagaactttgtacctaaaaagatacaaagtttcctcgtctaattcaaatgatattacagaatttatgttatgtattattctttgttgtatgttttacgaatggcttctttgatgctttcaactgttgggatcattgcattctctagattttgtgcgtaaggcattggcacatcttcccccgcacaacggcggattggtgcatccaagtaatcaaatgcttctgattcagagataatagctgaaatttctccgatatatccacttgttttgtgggcatcattgacaaggactacttttcctgtcttcttgacagaattaatgatgatctctttatcaagtggaaccaaggtacgtgggtctactacttctactgagatcccttcttctgctaattcttcagcagcttgcatcacgcgacgaagcatttttccgtaggttacgacagtgacgtcagttccttcacgtttgatttctccgacaccaagtggaatcgtgtagtctggatcaactggcacttcccctttttggttgaattctgatttatattcaagaatgataacggggttgttatcacggatcgatgacttgagcagtcccttcatatccgctggcgtaccaggagcaacaactttcaaaccaggaatatgagtaaaccatgattccaaagattgggagtgttgagctgcagatccaactccattaccagcagcacagcgaatggtcatcggtacttgccctttaccaccaaacatgtagcgagttttagcagcttggttgacaatagcatccatggcaattactgagaaatccatgaaggtcatatcaacgattgggcgaagtccggtcatggctgcacctgctgctgcacctgaaatcgcagcctcagaaatcggacagtcacggacacgttctggaccaaactcttccagcatccctacagaagtaccgaagtctccaccgaaaactccgacatcttctcccatcaacaatacattttcgtcgcgacgcatttcctcagacatagcaaggataatggtatcgcggaaagacattaatttagtttccataattctctactcccccttagtctgcgtaaatatcttcgaaagctgattcgagtggtgggaatgggctttcttccgcaaatttcactgaagcttcaactgcttctttcacttcttcttggatctgatccaattcttccgcgctcacaatctcattttcaaggagatacttgcgaaggttttcgatcggatctttcttcttccactcttcgacttcttcacgtgtccggtatttaccagggtcagatgaagagtgaccgagccaacgataagtgacactttcaatcaagacaggtccttttccagagcggacgtgttcaacagctttttggaagccttcatagacatcaataacgttgttcccgtcaggaataaacattccaggaatgccgtatgcagcactacgctcatgaatgtgctgaatattggtcattttcttgatatcagcagagattccgtaaccgttattgatacagtagaaaattactggcagcttccagatggaagccatattgaccgcttcgtggaagacaccttcattggttgcgccatcgccaaagaagcagacgacaatcttaccagtctttttcatttgttgtgtaagggcagcacctactgcaattcccataccaccaccaacgatcccgttcgcgccaaggtttccggcatccaagtcagcgatatgcatggaaccacctttccctttacaagtaccagtatatttccctaggatttctgccatcatgccattcaaatcgattcctttagcaatggcttgtccgtgtccacggtggtttgatgtcagcaaatcatcatcgttcaaagccaacatcgctccgacgttagccgcttcttccccaacagaaaagtgcgtcattcctggcactttccctttttttactaactgtgcaatttttaagtccatgcgacggatttcttccattttacggaacatttccaataagagacttttgtctaatgttgccatcatttcgcctttcttagcttttattcattcactttcattctagccaaaaatgaaagctcagtcaaaaataatgctcagaaaaattcacaatcctaaacactataatcatggaaactataagctttcaaaaggaaatatttagttttttcacaaacttctagatttttccatctcattcaatagtcacataaaaaaccgataggatcctatcctaccggtcgtcatcttatgattggcgttggccaaagtcatgaatcatttgttccaattcttcacgactaggtgttgtaagcatatagaggtaatctccctgaagttccgcaaaggccgctggcatgtctttcttcacacggaattgatcacggtatttggccagaacttcttcctctgaaagagcataagctgcattggcacgacgagaagttgccaagcaataaaggggctcaaactcagaagctgggaaaggttctcctgctacgatggcagcataacctcggtacaagtcgatggaatgagcataattgtagacatcgatcgtaaagccacctgctggacgattattgtactcgattgcaatatagtcatccccatcgcggaaaaactcaatgtggaagaaacgttctttcattccaaaggatttgacaacggcttccccgtattgacgcaattttggatccatctctttgaggacataataagagttatccatcttgtagagcatcaaatctagtggcgtatgtgcatagtcaaaagtagttgaaaagacaatattgccatcgcgatcaaccaaaccatcgaaggtacaaatctcgctagaagtgacgaatttctcaaagaagtacaccgtatgtccatcccattctgctttgaaatgatcgacagcttctggtgtttcaagtttgaaggtcgctgctgctcccactccattatcaggcttagcaatcaaaggtagaccaattttcttcacagccttgtcaatgtctttttctgttttaaccacagcacccggaacgactgggactccagccttcttgaagagtttcttcatttcggatttgaacttagttttcttcagatcttttggcttagctccgaagacattgaattgctcacgaagtgccgcatccaattccaaccaatactcattgtgagattcgatacgatcgattggtccatgtttgtaaaagaggaaggctactgcacgcttcacttcgtccagattttctaaattttcaacacggaaatactctgtcaagctattgcgcaaaggctcgtctaactgttcgtatggctcctgaccaattcccaagacagtgatccctttattagcgagttcgattgtaaattgttgaaagttttgtgggtaatatggtgaaataacgatatagttcattgaggtctcctcccttttgacttatagatacatttgtcctaggaaatagggcatttgtttgcgccaccattcccaatcgtgggctacatcatggccccattcagcgaaccaagcgggaatgtttttgtgatcaaaggcttctttcagtttatagaaagatggaagtccatcctgctcccaagcacctaaaccagtacaaacaacgatttcggcctgacggtaacgatcgataaaccaaccatcattttggttccagatataatcagatggagagttttggtaaatggcttcatcgcctccaaaatcaccaacaaagaaacgagcgtcatagacaccactcaaggcaatcactttattgaagacatctggatgttgcaagaagaaattgagcgcgtggtaagcccccatagagcaaccagttgtcatcatcgggtcaaaccatcctgttttgtgtttgataaaaggaatggcttcttcaatcacatagcgttcataagcgcgatgcatttcagctcgatcgtgtgggtttttccaatcacaaagccagctttcactgtccacacttgaaagggtgaagaattgaacccgtccttcttcaataaactgagcacaggcatcaatcataccaaagtcatagtattcgttatggcttccacctgatgaagcgaagaccactacaggaatccctgcatgtccataacggtttagatacatttcgcggttaagttggccactccagtggcttagatgttcaatattcataggttccctctttctttattataaaaatttaaaagcttctagttccacttctctgctaagaaacgaagacattctggtaaatgctctgcccaggcttcttcatggtggatagccccagactgaatccgaatggcgatattttctaaagctactccttgttgaatgacatcatgatagtaacgaagagatgagtcaatataggcttgcttgatattccctgccatcagggttttatctgtatcatcagcctcttcagtccccacatagatgtaaatgcgttgatcaacatataattttttacgctcgatataatgattgaaggcatcttggtgtagccagttggcggatgaaaagacccctaaacaaccgatttgatcttggtactctaatcccaagaattgggtaatatttccccccaaggaagatccaatcatggccgtatgttctcgatcagcaagagtccggtattcttggtcgataaaaggtttcaccacctccatgacaaattcgccgtactcaacccctttgccaccaaattgcatgccaggaatattagattccttgtacttccaggcagagtattcattcatgcgttggaaaccatcattatcgatcgcaacgacaatcatgcgactaatatcgggattccgcttaatggctggaatcaccttccaggaatgacccgcataagcttccttgctgtacaaaacgttttgcccatcgtggaaataaaccacagggtaacgtctatctgtatccgtttcataattcttaggtaataagactcgcacacgacggagttttccggtataaggcactttcaactcgtgtgtcttcatatctaaataaaaataggatttgttcattgtcagaaaactctctatattctaaattttattcattataccatttttagaagaaaaagtctggattttctccaaactttttcctttcttgggttatttttccataaactgagccaaatcttgtaaagaacgttcggcaattttctcatagcgctccttcttatctcgaatgcgtggtccttccagctccttgataattccaaaattgacattcatgggttggaaatgcttgctatcagcatgggtaatatagtgagccaaacttccgatggctgttgtttcagggaaaatggctacttcttctcctttgaaaaggcgagctgcattgattccagctactaaacctgaggcagctgactccacatagccttctacccctgtcatttgacctgcaaagaagaggtttggttgtttcttcgaacggtaggtttgttccagcagatttggagaatccatgtaagaattgcggtgcatgacgccgtatctgacaaactccgcattttctaaaccagggatcatttggaagacccgtttttgctctccccatttaaggtgcgtttggaagccaacgatattgtagagactagctgctgcgttgtcttggcgcaactgaacaactgcatagggtgtcttaaactccccatcgcgtggacctttgtaatcatctggatactcgagtccaacaggtttcatagggccatagagcatggttttgatgcctcgtttggccatgacttcaattggcatacaaccttcgaaatacttttctttttcaaaagagttgagtggggcttcttctgcattaaccaaggcctcgtggaaatccataaattcttgtttggtcatggggcagttgagataagctgcttctcccttgtcatagcgtgacttgagatagaccttgtccatatcgacagtattgacatcgatgattggagctgctgcatcatagaaatagaaaccgtcgccaccattgagggcatggatcttttctgccaaggcatcgctagttagaggccccgttgcgaccactgtaatggcatctgtcggcaattccgtaatttcatcacgaatgacttcgatgagcgggtgttgggataccttctccgtcactcgactagcaaaaccttctcggtccacagcaagtgctccaccggctggtacacgagtcgcttcagctgcttcaaggatgacagaacccagacggcgcatttcttctttgagtagcccaacagcattggtgagagaatccccgcgaagagagttggaacacactaactcagcaaagttgtctgttttgtgttgcggagtggatttcactccccgcatttcataaagcttgaccggaattccctgttgggcaatctggtaagctgcttcagagccagcaaggcccgcaccgatcacattgatataagattgagacatgacactaatacctctttgggtatcaaaacaccccactggactgttagacacccacaaatctttctaattttctacttggtccattataccaaaaagccaagtaaaaagacagggaggtttttccttcctgtctagactttaactatttattttcttataaacacaaccaagctcctaagagggctgataggatactgaataaggacccgatcaagtaatactccgcaaaggctggattttccgaaattttattgtagcgggcgatggatttggccgtaaatactaggccgatagaagcaaattgtccatagacgagacaggcgccaatcaccaaacgctctaaaaagccaatcatggaaccagccccagtgatcgtatccattttcttcttgctggtgggttgatacttggcaaacagaattttaaaggcaatattgcttggtttcccaactaggaggacataaaagatcagatttaaagtgtccaagggtagataggtcgtcccattcttcgctcccataaggactagacacgtcaagatgccaatatgcaagacttgatccaaggcaaaggtccatgcggttggtaatttcagttgcttctgcacgatcggttttaagaaatctattccagcatgagtcagtaaaatgaccaagcaaatccaccacaagtccagatgacagagagaaaccacgatcagaggcagagctacatatagaatgtgaagcccgagaaccttcttatcctgatccttacgatccgccatcttctgactttgaaaataataatccgataacaaatgacaaatcaacaagaggatcaagtatggattcgttacgatactagtcaatccgctcatgggcctctcctttctctaagctctgaatacaagctagtgctgctgctcgtccccgtaaataaacgcgaatactgctactctttaagcgcttggacagggcactcgggttaagccctagcgattgggccaaatcctgctggctaaagttttcactatagacagatctctttagcagattaagtaggatctcttcctgactctctcgccaacccgaacgtatggcttctccggaagcgatgagcgcattcaccaatgagtcctggctgtcattaccgctcaaaaaatagatctgggtgttgccataatcatttttctgatggaccagattaatagctgcacgagcattccaatagactggcccatctgcaccgatactttgcaggggatcgatatccgttacaatttctccaagcccgataccaaatcgaagttgagtcggctttagttctgaacgcagggtatcaatgatttgaaaaatcggagcatccacttttaaaagcgcctgaaactcatcgcccaaagttagggtaaaagccgatgctaggcagcctttaaaaagctcattgatcttttgaagcgttttttctaactgtttttgcaggtcaaaacgttcttgtacgattttggaatcaatcacatctgcaatcaaagcaagatacataagcccacctccttatgtctattataacgaaaataccaaaaaatgtctattataacagacatttataaaaattgccgttataatagacattgaatcatttaaaagcttatttcactttttcttcttcgtagtcgccattgctacatacgacttgtttgccaccaccacgaacttttttctcaactaagtagtggccacattttggacaatcccgaccaatcggcttatcccaagaggtaaattcacactctggatagcgattgcatccatagaagatgcggttgcgcttggttttacgttcgatgatttgaccttgatgacagtcaggacactccacgccgatttctttgacaatggcctgggtatgacgacaatctgggaaattactacaagcatagaacttaccaaaacgtcctaatttaatcaccatcgggctgccacagacttcacaatcaaaaccagccggttcatctttgatttggattttttccatctcttcttcagcctttgcgacttctttagagaatggtttgtagaaggcatcaatgaccttttgccactcttcctttccaagttcaacatcatcgagtttcccttccatctccgctgtgaaggtcacgttgacaatatctgggaagaattcaacaatcagtttattgacgatctcccctaactctgttggttcaaagcgtttggctaccagcttcacataataacgtttttgaatggtctcaatcgtcggtgcataggttgaaggacgaccaacaccgttctcttccaaggtcttaatcaaagtcgcttcagaatatcgagcaggtggttgggtaaagtgttgctccggcttgctattgacttgcttgacaatatcaccttctaccatatccggcaacatcttgttcttatctgagtcgttataaatagccaaataaccatcaaacttcacctggctcccgtttgccgtatactgaaccccattttgacctaaacggacattcatggtatcaaagacagctgctgtcatttgactagctacaaagcggttccaaattaaggtgtagagcttgagctggtccttgtcgaggtacttggcaatgctctcaggagtattgaagacgctagacggacgaattgcttcgtgggcatcttgggcaccagaagcattcttcacacggcttccatgcttggaatatttctccccgaagcgatccacgataaagttcgctgcctcattttgcgcaaccggactaatccgtgtagaatcggtacgcatataggtaatcaaaccttgaacaccagagccaatattgattccttcgtacaattgctgagctaccatcatggtcttgcgtgtacggaagttgatcttattggcagcatccatctgcatggaagaggtggtgtatggaagtggtgcattccgacgacgttctttcttttccactttttcaacggtaaaatctttgccatctaagcgttcaagaacagctttcacctcttcattggtgttgagcttcatcttcttgccatcaatcccatagaagctggcttggaattgcttggtcccttttttgaagacaccatcaatggtccagtattcttcgggcttaaaatcattaatttcattttcacgatcaatgattaatttgagggcaacagattgcacgcgccctgcagaaagtccttttttgacctttttccaaagaataggtgaaatggaataccctacaatccggtccaagacccgacgtgcttgttgggcatcgaccaagtccatatcgatttggcgcggttctttaaaggcatttttaacggcatccttggtgatttcgttaaagaccacacggtttttttctttggcatccaagttcaaaatatgcgctaaatgccaagaaatagcttctccttctcggtccgggtcacttgcgagaaagacttgtttggcttttttagcttcttttttcaaatcattgatcaagggaccttttccgcgaatattgatatactccggttcatagttattgtcgaagtcaatcgacatcgtagattttttcaggtcccgaatatggccaacactagccatgactttgtagttacgaccaaggtatttttcgattgttttcgccttcgcaggagactccacaatcaccaaatttttcttggttgtactacttttcctttttgtttttgttaccacgttttatccctctgtattgtataaatctcattgagtttaatacattttaagaaagatgtcaactaggaacttctcctataggaaaatcacaattcgtatttcaattcatcaagaatgtcctggcctgatgtgacaagctttgcgccttcttgaatcaagtgatggcagcctgcagattttccatctaaaatatttcctggaatagcaaaaacgtctctcccttcttccatagcacgctcacaagtaattaaactacctgaacggagtcgagcctctgccacaatcacagcctgacagaggcctgcaatgatgcgatttcgctctggaaaatgaaacttaagtggtgcctgccctggaccatactcgctcaagatcagatggtgttcccccatatgcgcctgcagtctttgattgctcttaggataaaagacatccagtcccgttccaatcactccgatggttttgccaccattgcggatactagcataatgagctgtcgcatcaattcccttagcaagtccactaacaatgaccaattcattcccaagttctttaataatcttctctacagagcgaaccccttctcgagtggactcccgagctccaacaactgcaatcttcggtttggttaacagctccaaatccccttggtaaaaaaggattacaggagggttgtagatctgtagcaattcctcagggtattcaggatcaaaaatggttagagatgggaaccgttcgaactccttgtgtaaatggtcttcatccagttgtcggtatttgtctacaaaatgaaggatactgcgacagcgagcgatccttgctatctcttctaagcttggtaagacttggtcttttctacagtagtccaaaactctcaagacttgctcatttgataaaccggcttcttttaatttaaagatttcaaatttctccatggtcaccttctacttcctctcacttatttattcgaaaaagaaaagaaaaaaagctctatttctagaactttttttgatgtgcagaagaataaaagtaagatgcggcaccaatcaagttgctttcattatggaagcgagccgcttggatggacaaggcctcaaattgtttatgccctttttgagagagcaggtcatggtattgtcgactgatctcatcgatcagtagtggttgactactaatgccccctccaatcgtcaccttctcaagcaagagcaaagattgaagattaaaaatcagaatagcaatatcatgacaatactcctgaaacaaggatgtcagctcctcatggcccccttgatcaagagctttgaaaacagctataccatctgccttttctaggtttaagatgtgacgagctttctcaacaaattgaacagctgaaccggtgttttccaaaagattggaaatgccttgcaaaaagagttcgcgatgaaagcggcgattttctggtgttctttctgccttatcaatagaccgaatgtattctgtcagttgccaacctctcaataagtcaccgttagaaagaagagcaaggccaactcctgtccctaggaccaaggtcgcaccgcaaggacaattttttagattaccaagccttgcttccgctagaccagcagcttctccatcattgagaacagtaacagggacttgaaatgtttgttctagtctacttgctagaggaatgccgcgtaaatatgaaatgagaccacctcgaaagacaaagccaaggctcttttggatctcaccagggcatgaaatggcgattccctcgatttgttcccttgcgggtgtaacgatttcttctaatccttgccaaaactcctcaatcgtaggtggtgttgggatcttgtctgtatggatcaattgatagtctgcctccatcagaccgtactttataaaggttcctccgatatcgatggtaaatagcatgacctaatcctcacacattgatttgacgggttcaaatgaacgccgatggataggcgtcactcccagttggtcgaggccagccagatggtttgccgtcccatagccagcgttctgcgcaaaatcataacccggatattctttatcaaactcttccatcatctgatcccgagtcaccttggctacgatggatgctgcagcaatggataaggagttggcatcccctttgatgatactagtttgggaaataggaagatctaacctcatggcatcaatcaaaagatgctggggttgaggctctagctgaccaatggcctccatcatggctagcttcgtagcttcatagatattaacctggtctatcacttgattatccttggcgccgattccgatcgcaatggcattttggagcacagcctcatagatttccttgtgtttggattttggaatctttttactatcgttgagtcccggaattttacaagctttcggcaagatcacggcagcagcaacaactggacccgctaatgggccacgtcccacttcatccactcctgcaatgagctccatcccacgagcatagcattctttttcataggccagcattccttccaagcgctcgtcttcatctaaacgtttttggatttctctttttcgctttgcgatcgcttggatcacaccagatcggctatcctgttccaattcagtcaataaaggatcgtctaaccgctgaatgcttgctaattgctctttaatttccttaatggttgccatcaatttcccctacgcgatccagcgtataccgtcccaatttcccatcgcgaacatctttgacaaagagttggtaaaaacggtcgtaatcttcacgaaatcctaatttctgggtcattgccataatgatttcaggagcttcttgttccagatccatttgtttaaaacgttcctgcaaaacagttgggtagtgctctttaaaatagttaaggccaaagatggtcacttcatccattggaagcaactgatccttgatggcgcctgttaaagcaagctttaaggccacttcttcatcttcaaacttgggccagagaatccctggagtatccaagatttcaagatccttattcgttttcaaccattgttgccccttagtcacccctggtttattcccaacaacagcaatctttttccccgctaagcggttcatcagagttgatttcccagcattaggaatcccgatgatcatggtccgaagggtttcaatctgaatccctcgttccttttgacgggcaattttatcggccatcaaactcttagcagcatctgtgaccttcttaaccgtagattgctctttggagttaatggctagggttttgatcccttgtgattcgaaatagtcctgccattcttttgtcgccacaggatcggccaagtctaccttgtttaaaatcattaatttaggcttatcaccaacaattttcgttaacataggattttggcttgataggggcaaacgagcatctaccagaaccgtcacaaaatccacaaattttaaattttcttgtacttgtcttctagctttggacatgtgtccaggaaaccattgtatagttgccataatctcacttcctttccagttcaatctcttctattataccatgttttctagaattctcagtgattaataaaaatactaaaaagaagccaccgaagtaacttctattttatattctagcgaatttgttcaaaatgcaaatggacggcgatgtggtctccgtagccactacgctccaaatcacgttgcaagcgataagaaatataatgctccgcgatagtaatatagcctgcaccaagcaaacggtgctcaaccattgattggatcatactgatggttgcacgttctacttttgcttcttctaaatccatcactactttcttagtgacttgggccaagttttgacgcaaatcatctgtcaaaacataaaccgtttgagctgcttttaaaaccgcttggtagattttatctggatcaaattcaactacttctccactacgtttaatgacttccatcggagtctcctttattttaaattttcatgaacactccatttcctttataaagaaatgaagacctactactttattatataatttttttacaaagaatcaaaggtctttcaaaaaatagattcattgattgggaagttaagttatttttattcaaacacattttctacaataaaatattagtaatctggtcttaaaactcccgtaatgatttctttggtcgcgtggtaatccccatccactacaaccttgatgatgcgtttcgcatcttctgccggtgctggcaccaatggcaaacgagttggcccagcttcaaagcccatatagtttaagacagctttgacaggagctggactcggataagaaaagagagcattgactttagggataaattgacgttggatggccgctgcctttttaatatcgttgtgttcaatggcttggaacatctcatgcatctcatctccatttgtatgagaagccactgagatcactccatctgcaccaagattcatagcgtggaaagcatctccatcttcacctgtatagacgagaaattcttctggcttgtgttcaatcaagtaggccatattagcaagggttgtacactctttgaccccaatgatatttgggtgttctgccaaacgaagcatggtttcaggcgtcatttccacaaccacgcgtccaggaatattatagataataatcggaagattagatgcatccgcaatcgctttaaagtgttgatacattccttcttgagatggtttgttgtagtaagggacgatagccaatcctgctgcaaagccaccaaaatcatctacttctttgacaaactcaatcgagtcgcgggtttcattggttccgacaccagcgatcaaaggaactcgaccattgacaatcttttgaacggccgcaaagagttgcaattcctcatcgtgggtcagagttggactttctgcagtcgttccagctaagagaatcccatctgtatgatgagccaagaggtgctcgatcaagtcaggaagagcgtcaaaattaatgctcccatcttcatggaagggggtgataaatgcagtgatgattttacaatcttttaaatcattataagacatagaaaaacctttctctatataagaaagaggctggggcttgcttgcctttgcctcatgatctgttcataaaacaagttgattcgctagttagctgatgaagaaatcaaactcttcgagttactgatttctgcttcgctccctatttcaattcaaacttcaattcagctgttggacgtacgagtccacgttcatgaagggtttctgcgatttggactgagttccaagctgctcctttaagaaggttatctgaaaccacccacatgtggatccctttttcagcatccaagtctttacgaatccgtccaacgaaagtatcgcgtgaaccgaccgcattaaccgcttgtggatagacttgatgagcaacatcatcttcaaggactgcacctgggaattctgcaatagcagctttcacttcgtcaattggtgccacttcttttgtttcaatgtagactgactctgagtgagctgacaagactggaatccgcacacatgttgctgaaacggcaatgctatcgtcttccatgattttcttagtctcgttcgtcatcttcatttcttcataagtatagtcattttctgtgaagacgtcgatttgtggaagagcgttgaaagcaattgggtaatgttttttatcaccaccacatggcaagatttctgctttgacatcgcgtgggttgaccccgtcgttcaagacttccttcaactcacgttgggtttcaagaatagctcccataccagcacctgatacagcttggtaagtagatacgatgatacggttcaagccccatttttgacgaactggctcaagcgctaccatcatttgaatggttgaacagtttggacaagagataatgccgttatgagcatcaagcgcgtgtgcattcacttcaggaacaaccaatggaacatccggattttgacggaaatatgaagtgttatcaaccactactgcgcctgctttcacagcataaggtgcatatttggcagatgttgaaccaccagctgagaaaagagcaatatcaaccccttcaaaagcatcttcagtcgtttcctcaatggttacatcttgccctttaaattgcaaaacttttcctgcagaacgtgcagacgcaaggtagcgaatcttatcgattggaagagttgattcttccaacattttgatcatttgagcaccaacggcacctgtagcaccgacaacagcaactgtgtatcccatagtaaatcctctttcaaaattttctaaaaattgagtatttgtactattatacaattttttggcataaatgaaaagtaccaacagaaggaaaaaatcctgattctaagaccaggatttttaatggttatttataataaatagctttttagtttatgtcatagttcaagtcacttaaatctttcttaccttgtgtttcttcagcaagaaatggaacttgatggatcccctttacacctgctacgatagacgccggaaatgaaacaatttcttgattgatgtggctgacattactgttaacaattcgcttcgctgcagcaagatcttcattttcgtcagcaatttccttttgcaaggccaagaattggttagaagacaagagctctggatagttttcaccgactgcacgaatttgtgccaagacatcattttgattggtaataacttggttggattcttgaatagtcgctccttggcgtaaagcaactaaatcggtaaaaagctgttgttcatgtttggcataagctttcgctacttttagcatttccgaaatggtatcatagcgttttacgaggacgatatcaacggttctctttgattcttcaatggtcactagatagcgattgaggcgatttcctacactaataaaccaaatagccaatagggcaacaaatatgattaagccgataatgagattcatgatgcttctccttcaaaaattgctgttatttctttaattaaagccagttctctgcataatttatgatattcagtcaccaaagatagttgatcaatatcttccggtttttgaggagtcggaaagatatagcgatcggtatacaaagaaataaaaagtttcttgtctttcaaaaatacacacatggcattttgagaaatttgtcgatcaaaccattctaacatcttaggggtgagaaattttcgggcagacagttcatccgtgcagtaaatattgtaattttcgttattgcgaatatcctctgtttcaatctgaacttcatttcctctggctcctggataatccccatttatctctctattaaaaaggaatgatttcttcgtcggaacgacacgaagatgacctgagaaatgaattggtaggtttaaaaagaatacttgtccgcaaaaatctgtgacttccacatgttccgttctcgtatgtccattggatgtccgttgacgagtctcagtatgatgagcatagagatttgacactgtcagctctttgtcatcatgaaatgatagctgtttgaaacatagaaaatcagtcgaccgaggacataaatgcgcgagagcttcagaggggatggaaccatcctcttttatcgaagcctgaggaaaaacttcctttaatacaggcgacaggatatcatctagatagatctcatcgttcgatcgaattcgatccccaaacaaggcttttcgttttttatattgtggccaataatacaaaccaacaactaaaaggatcaaaggaatagctgcaaaacgcaataaaacgagggacaatatggcacaaataataccaaaagatcggaaaacattccattgtagattgttcttcatttgttctcggattaatccgattgcatcctgaaattgtttggagttttctagctcctcaattttatgcgaatggtctgtagatacaggaccattagaatgatagatatctcccaaaatcctccactcctttcagacgcaataaactttactatattataacaccaatatttttacatagcaactgtattataatagttttaaaaataatttagtgtctttcaaggtacaaaaaaatcctgatccgaagatcaggattcgaggcacctttcggtgagaacagccggttcacacaactgttcaaggtccgctcctgcgttacaattgaatgtagacctcctcagcgcaaaaggctccaaggagccaatcgactcatcgcatgagactattatagcatactgaactccagagtcaagttcttaatttctataaatacttacttgcctcacgaatgctaagagatgccatttgactagcatgttgatcaataaaagctcgaacccaatcaggatttacctttgagtaattgcgcaaactccaaccgatagccttattaatgaaaaactctgtctgtccaaagttgttacagataacctctgctagtagatcagtatctgtcaaatctttacacataagctggtggtcaatggcaatacgtctcaaccaaaaatcctcttcaagactccattggcgcatgatattcttggtttctggatagtgaaaagtaatctctccaatgataaggtccaattgatctatactgtcccaccatgatttggtttgagccaatccctttagctttggaaaatcttcaggtctaagctccttcttctttttatccagataatccatagcaatatattggaactcacggtaaggttgctgccaacactcttccacaaaagtccaatcaattggatcctttatgaaaggtttaaaaaattctctttcaatctttttgagaattggtttttgaacgccaagaaagctgaatttatttttcatataagcttccattgctgggactttcgctggatcagcttggtcttctaacaatttcaaaagaatttttgtatccatatgattcctccttttttacatcaaaggtccaatcaaagaaaagagaaagccacctagacgatgagccataggcatttttgacaaactttccagagtaacttcctctgagagggcttgggttttctcaaaatcttgttcaatcttaagtacttcgagatttttgtagatatacaccccgttttcaaaattttgatagagacttcgatagtctgtattaatggttcctaccacagcttgttggctatcagaaacataaattttagcatggacaaagcctggggtataacggaaaatacggacgccagcatctaagagggctttaaaataggtcgtcgcaatatcaaaggcatactgtttatctggaatccctggcataatgatccgaacatctactcctcgtttggccgcaaaagtcatagctctaaccaattcgtcatccaatatcagatacggcgtcatgatgtgaacataatcggtcgatgtattcagtaaatgaagataaacatcctcagccaccttatgataagtcaacggtgaattgccataagggagtacaaagccctgactctttctttgttgaggtttttcttgtagatagtactccacatcccttttatcctctattccagtcactgtccacatggtcaaaaagagagcttttagcgtttgaactgctgaaccatctaatcgaagggctgtgtccttccaatgaccaaagcgttctcgtttattgacatactcatcagcaatattaacgccaccagtgtaagcaacttgaccatcaatcactgtaatctttcgatggtctcggtaattgtaataggttgatagaatgggcttgactggtgagaaggtctgagcttttatcccaaccttgtgcaagcgctcaatataatcataggacaaggtagtcatctcattcattccatcaaacatgacacgaacgtccagacctgccttggccttctcctccaaaatagctaaaatctcaccccacatgatcccttcgtcaatgatgaaatattccatgaagatataacgctcggcctttttcaaatcctccaacaaggctggaagcatgtcatctccaagtggaaaataggtaacctctgtgtctctgtagataggaaactgtgctggactatgctccaaaaaataagctaatttctgtaattggcgatcactttgggataaataatcagcaacttctggatcggtgcttaaatggtcggatgcctgcactgtagcatcctcaagccgcttcttcaagcgtctcacacccaaatcagctaacgaaaagtaaagcagagccgtcccaaaaattggaaagagggcaatgataattatccaggacagtttggaacgagaatccatggaacgattgagcaagtaaaagaaggtaaagacactcaacaagtgttcccataagataatggatgggaaatgctcttgtaggctgagatatgaaaagacaagaaaggccaattccagtaagaagaacaggagaatgggaacctttcggttaagtagaattttggtccatctggagggcttttgaggtaacagtctagcactttgttcttgagtcataaaaacctctttcatataaaaacatcttctatgctgaataatttatggattgtttcaagtgatatggagttttcatttcatttagctactactccttaacagctcttacttgatttttctcaccggcccttcgatcgtcttttgcatccagacgatatcatgccatttgttaaacttatagccaatctttgggaaatgagccacttggacatagccccgcttttcatgcatggaaatgctcgcttcgttcgggactgcgatacaggccagaaagcgtaagtagcctcgtgcttgtagctcttcttctaaggccgtataaagggccgatccaatcccttgtccacgcgcttcttttgctacataaatagataattcagtggtccaatcataggcagcgcgtgcataataggtcgaggcataggcatagcccacaacttttccatccacttctgcgaccaaataaggaaattgagtcagcgtttttgtgatgcgactttcaaattcctggacagtcggcacatcaacctcaaaggtaatggctgtctctgtcacataaggttggtaaatcgctcggatagctgttgcatcgctgagctgaacgggtcgaatcatcatggtggcctcctaattagattatacctagtataccgatatgccttatcactgtcaatgaagagaggcaaagatctaatagtttcatttttttgcaaaaggatttatatagaaaagaggttgagaaatccagtctcaacctccttagtttattccgcttttttatttgaaaattggctattgtagagctcatagtagaatcctttatctgctaacaaggattggtgatttccttgctcgatgatttggccatctttgaggacaaggattttatctgcttcttgaatggtagacaagcggtgagcaatgacaaagctagtccgccctttcatcaaattcttcatcgctttttgaatcaagagctctaaacgcgtatcgacagaagacgtcgcttcatccaaaatcaagattttaggatctgctaggagcgcacgcgcaatggttaggagttgcttttgccctagagaaatattgctagactcctggttcatttccatattgtaaccaccaggaagcgtcctgataaagtgatcgacattggctgcctttgcagcttccacaatttcttcatccgttgcttcgagattaccaaagcgaaggttttctttgatggttccttcatataaccaagcatcctgaagcaccattccgaattgtttgcggtaatcttggcgagatagatgacgaatatcatgaccatcgactgtaatcgatcctgcagtcacatcgtaaaagcgcataagcaaattaatcagggttgttttccctgctccagtcggtccgacaatggccaccatttcacctggtttcacttctaggttgaaatcacgaatcaatggtttgtctgctacatattggaaatcaacgtttttaaagctgacttgccctgtcaaatctccagagagggtttctgttacatctgctacttcatctggctcatccatgacttggaaaatccggtctagagacgacttagcactttgtagctgtcctgccaattgggtcaagttttgaatcggttggttgatctgccaaacatattgaacgaaggcttgcatatttccgacagtcaaacgacctgctaacacttgcaaaccaccaaacaaagcgataatgagataagtcaaatctgaaatcccatttaaaatcggcatcattaagccagaaatgaaattagccttgaaccctactttttgaaggtgatgggtaatatcatgaaactcttcctgggaagatttttcccggacgtagagcttaaggacattaaagcctgttaaattttcttgcacaaagccgttcattgcccccaaaacatctgcctgctctttaaagtaaggctgagattttttcatgataaatcgagcactgaaataagtgatcggaatggacaaaatgaccactagccccagctggatgtttaagtataagaccatgctgatgacaaagagcaaggtaaagatagcgttgacgatttgtaagaaggactgttgcaaggcattcgagacggtttcgacatcgctagtaaaacgtcctaacaaatcaccaaactgatgccggtcaaaataggaaaccggaatgtgattgattttatgagacaaatcatttcgcatgtcctgaacggtcttttgaacagcattggtcataaaatagttggaataataagatcccaactcatagaggaccccacggaatagatagagcgtcataatgatcgcgatataggaggtgttaagaccagctcccgcaaggccttttgccatatccatgagattttttgtcaactcagtaatcgcaagccccaaaacaaagggttcgacaacactcatgacgacactcaggatttttaagaaaatggacaagcaaacttccaagcgataggctctcaagtaagtccatagtctactaaaactgttttgttcttgtttcatctgcttctcctttctattcttctgtcaatgatggactatcgagctgcgaattagcgatctcacgatagatctcattactttccatcaattcatcgtgggttcctctaccaacgatctctccatggtccaagacaataatttgatccgcatccataatggttcccacacgttgcgctacaatcaagacagtcgcatctcctgtgacttctttgagacgcttccgtaaagtggcatccgtcttgtagtccaaggcagagaaggaatcatcaaaaataaagacatctggatctttgacaacagcacgagcaatggacaagcgttgtttttgaccacctgaaaggttgcttccaccttctgccaaatgcgtatcaaagccttcctcgcgactgtcaataaattccttagcttgggaaatatctgctgcttgttctagctcttgtacagatgcgtcttctttcccataacgaaggttttcagcaatggttccagtaaagagtaaggccttttgcggaataaaaccgatcttttggcgaagggccttgagattgtagtcacgtacatccacgccgtcgaccaaaatctttccaagtgttacatcatagaatcgaggaatcaactgcacaagtgaagatttcccagaacctgtcgatccgataaaggcgattgtttcgccaggtttggcctgaaaggaaatgttgtgaagaactggactctccgtctcacctggataagcaaaggtgacattgtcaaattccaaatagccacgagatgctgtctctgttacaccattctcattcggatcaatcgaaatgggcatgtccatgatttccttgagacgacggctagaaaccgcagtacgaggatacatggtaaagagattggctaaaaagaggaaagacaagagcgcgtggaagctatactcaataaaagcaaccagatccccaattttcaaactaccgtcatgaagaggatccaaagcaaaccagacaatcgccacaatcatagcaataatgatctgcacaaataagggctctgtcaaaccagttagtttgaacaatttattcgagttttctgcgtagacttcattttcagccgcaaatttctcttcctggaattcttcacgggcaaaggcacgaatcacacgaagtcctgtcaaattttcacgcgcaaactggttaagatggtcgagtgtcttttgttgcttctcggaaagtggacgtgtcttgactgctacataccagacgacgacagcaagaaatggtacagaaaccgctacaatccacgctaaagaaggactggttgtcagaatcaagagaacactggaaaccatcatcaagggtgtgatgacccccatcttcaacatagaatccgcaaactgcatcaaaacaaaggcatccgaagtcaagcgagtgaccaatgacgataccccaatttgctcatactcgcgatgcgagtactcctgtaacttggcatagaggtcatttcgcatatcgcgcaccatggtggtcgttagttgaccaaccgcgtaagacaagataatccgtcccacaatcccaagtaaaataatcgcaaacatgacccagccccagaaatacagccggtccacatcacgcgggttaatcccctcatcaatcatgcgagctagaatcgttggcaatcccaaattgacaataacaaacaggaccgccgaaaatagattcagggctagccacttgggatactttttcaagtaagaccaaatatatagcatagatgattctccttttccataaataataaccttgatcacacagaaaagagggagcgagacgaaatcattttcaaagaaaatcattctgccccagtcccatctgtagtctcattcattataccaaaccagtcataaaagtaaagcaaaagagcaggtttccccgctcttcactttcattatttcgtgcgtttgagtttagcatttttaagaatcataagatccccttggttgctattacttaacttagaaagatcaaatgtcaaatagtcaccatcgaccttgtatgtaatcttttctccactaccatcttttgaagtgattgttttctctttttgattgattttgacatcataagatcgatcattcttttgaccagcgacttcacccgcgatgctgagggttccttttgaatctttgatcttaatagaaacttcaaaattaataacgtctccaatagactctaattgactacctgataagccttgctcctcaagaattttcttgagttcagtttttgatggtttgtagacataagtcccattatcacttttggcaccacatgccaccaagaggactgctgcaaaaattgcaacgaaagctaaaagaatacgtttaatatttttcataatcaatctcctaatgtattttataatcagattttaccactattttaataccgattcaagatgttttaaaaaagaagaaaaagagcagatactctctgcccttctcttgtattattttgtacgtttgaatttagcgtttttgaacatttccaaagcggcttcatgacctgaactcttttcaccagataaatcaaaagtgaacacatctccagatactttgtatttaaccttttcgccttcacctgttttagattgaagagttttcttttgttggtcaactttcatatcaaatgattggtctgttttttgtcccatcatttcacctttaattttaaggctacctgttttatctttaatggtcactgaaacttccaatttaacattgtcaatcaatgcatcaacacttgaacttggagcaccttgttcttcaaggatttctttcacttcagattttgcaggtttgtagacataagtcccgttgtcacttttggcaccacatgccaccaagaggactgctgcaaaaacagctactacagccaaaagaatacgtttaaagtttttcataacttctcctttttaattagattaaaccaattataacaacaattcagacacacggcaatgaaatattacaaatgtaatactcttgtaatatatttatcaactaatattaaacgattaaaaagggaggatccgtacctaccatttcttttatttgatctttttaaacttcgcaaattttataaaatttatatagatgtcggaattactcctgccagaatcacttacatctttaattgttaataccccaccagaaatttgataagtaattttagtcttactatattcactttccaatataattgttttagctttttgatcaaccttaaaatcatagggttgattggtattttgaacatttgattttatttgaacctttataacccctttttgtccttaatgataatagaaaccctaaatttataatcatctgtgataatataagcaagttcacttggtagcatctccctcacttcttctgttgtgggttcgaatacataagtcccattatcactttttggaccacaggctaccaagaagactactgcaaaaacagcaactaaagccaaaagaatctgtttaaaatttttcataccttctccttatttcatagaatatccctattatagcaacaatattttcgtatctcaatgaaatatttgatgatacgggacttgtaaaaggtataaaagaaataatgcacaaaaaaaccgaggcctaaacctcggttttcattttgattgggaactctattatttaagagtaactgaagcgtcgttgctttagttgttctcacacagctattttttacttggtttctccacttggcgggattgtggcgggatttacagttagtccgagctctcctaacacctctgttatttcagcaccgccagtaacaatctgtctatcatagaaatgagaataggtgtttagtgttgtagctttgtccgttcttcctgaacgagccgagacatacaaaacatctttttttagaacgtttatcataaatgaatcatgactatgacgtagacctttcccagtaataaccggaaccttagccgctagtgcatgcctttttaacatacgacttaaggtagatttgttcattggagagttaaaccgtgctaatacgaaattatcttctctattatacacttgtacagttttccaattttgcaacactttaacagtttcgtcatctatttctaagaaacgcattcctgccctagtttttgtctgctcttttcgaacgtatttcccattaccttgatattcgagggtagattgaatatgaataaccttatttttaagatctatgtctgaccactttaaactaagaccctcagagactcgcatccccgtcataaaataaagccagatagccgtataaaactgcctctcttcataaactgtctgatcaaaagtttttaataccttatcaagttcctctacagtccaaaattcagttttcggtttttctcctttaggattgtctaactttcgacaaggattattctcgatgtattccaagcgttctgcataatttaagcacttcttcagtttacaccaaagtccttttgcgtagtttggagagtagtcttccattaaagataatctaaaatcttcgcattcccgaatattgatttcagacaatttcttgtcagcaaaaacttcaataaaagtcttatattgaggataagctgtttgataggttacagactgaacagttttcttataataaggcaaataaacatcttccataaattttgaaaatggaatatctaattgtgatctttttgcactgccactagctattttagcattgtattcagttcttatcctacagacttcgtcaaaggcttgcttttcggttttaaaatcaattccaaattgatccttataagattttattctaatccgttttcggtcacccgtagatggatctacactgaattcaacctcatagtaaatttttcctttcttatttcgacttacgcatttatattttttactcattttgttcctttctttcagaaagcaacttaaaaccgagtaattcttctacaatataagtaggagctaaattaagacgagaattgtcaaaaggtgatttacttaattctaccacattatttgataaagctctagattcttcaaattgtcggacagcaattaactttgcttgtcttataatatcccgtgcagtatgttcagggaaacctaatttcattaattctgtatgatttattgtttgcatcatctcttccttctaattcttaattacagagatttccatcttttgataaggcttagaattgttcaacaaattagatcattaaccaaaagccttaagctacttttctctaaaataattgtacatcgcataatagtcaaaatccatcttaatgccagttcttccattacgattttttaaaaccaccaactcaatttctcgaggatttctcgatttagcttcattaacatcaaaatttccttgaccagtcccctttagttgaagtccaatcaaaacatcgctagaatactcgattgctccactttccttgaacgactgcatacttacaacagatttgtagttttctctattgaaagaagagatcgcgataactggtgttttataatctcgactaatcctttttaattctattaccgatctatctgtgttttgtttttcagttaatcgttcattcaccgggtataaaatctgtaagtaatcaataataacgacaggtacttttccagtatatttgagatgattttcaacagttttccgaattagctccacaccaataagtccagtaccttctacaatgtaaatatttttgcagtattgagagtaattttctctagcttttttaatcaaatcaatctctggggtgctgtaacctgaatatctactcccctcagtaattcctcgtgctgtttttgcatttctgatatcactattagaggcaagagattcgataaccgtgtggcgactaatgcttttactaattatttcccatctagacatttcaatactaaaaatcaaaacatctgttccatgtgccgcaatttgatcagcaatctgagttacaaatgttgtcttaccaagagaggaaattgcaccaacacaatataaaccttcgtaaagacctccttctaataaatcatctaaaccttcaaaatttgttttaatacatgaattattagaaccattcgtaataccattaaaaaacctcggaagatgattagctgttgaatattcaagataccgctctttttcactttttgtttgattgattgcattttctaccattttgttaaatactcctttatttttcactaacatatcgttaggatcttttacatcatcaatagttaatttgaaagaaataaatttaattttcttatttctaaattgctctgctaattttagttcagcctctctccccttttcgtcatggtccaatgagagaatgaatgtacgatcaatttttagatcagaaacaagattaattaatttatttatatttccaatgctaccaagtcctactgcctttccaccaacttcaacgatgctcatggcatctatttcgccttctacaataaaaattggatccgtagattttttgaagagttcgcttttattaaaaagatcgcttcccccaactttctgtttaatataactcaattgaggtccgggtacaatttctcttgtatcacgagcaaaataacaactctcgcttaaaggaataattaacctgggagtttcagggacatttggattagtcactttgggatgcttccatttttttacgtaaccaactttaaaccgttggactgttgaaaaactcaaccctcgtttaagaaaatagtcagtttcacaaagatgctttattgcctcattataaaaacttgaataattatcttttttctcttctccctttaaaggaaaaacagcattgtaattcaaaaattcagttctctggttcttgtatctatcacattcagttgatagattaaacaactctttgacacgcttcaattgatccttaaatttatcaattccttctacatagccgataagatcaaaaatatctccacctctatcgcaagagaaacatttccactggatttcatcgtaaatgtgaaaagcaccagttctgtttcttccttcaccactgtgacaaagagggcaaatatatgctcccttaccacctttaagacttggttcagagatttggtcaatgtatgctttcaaataagatttttcttcttcaaacatatttgtactccttttttcattgccagtaaaaaaataaaatccggatttttttctttacaggcaaaattatagcattgccttcaatacgaaaattgaaggcatatgctgcttattaatattattagtattgaaaatcagaaatactaataatatcagtgataccaaggatcaaaatttttttagcaaattcaacataccccaaattctaattcaacataccccaaattctaattcaacataccccataaatcctgatttaatcgaagcaaatcgataaatcagtgaatttaaatccctgaaactttaaaatgaattctaaatttctgaaattcaaaaaatgagttcatttttaactgttcatctgataaaggttcacaatttggattacagtattcccaactaactaggattttatcatcgattagtttatcaagtgaattagcaaagctctcctcaattcttgaacgccaaccacatttttttaatcttacctcttctataggaggaatttggggacatacatttaatagagcttcaacggaaatgatttcattagtcttttttcttcgattatttttgttactttggtgatagactagtttctttgcaagagaataaacatttttactacgttcatcaattttaaaaacttcgagaggaaaatttgacacataagatgtgattaaatatctaacgaatttttcagttaattgaactgtataaattccattttcgcatttgaattcctcgataaattttatatcattgaatacaacatgatgtgcacctctcttttctttagtactgatagaaagatcgtttagcaagcttaatgcctcttcaatgatacgacgtacattctttttcgttgagatacttgctggtttagatttccccaacagttttgcatactgtttaattgaaaattcaaccaagcagttaacagcctcttcttcacttagttcatattgattcttcttccctacaagcaaaattaataaatctaacatcttcaaaactcggagtttgaaataatctttgttagcgtcaaagttttcaatatgaatcgtaccagtccctaaatgaatcgaggttcgattagtgatcggatccctcactttgtcaactgttttcgaattaacagaaggtagcaaattcaaagtcggtgtatttaaaatcttctcgattttcttgtttttatcaacaggcattatataacctctttttttatttatttgaaaagattattgagggcacaaaaaaagagctgttagcttgtttgctaacaactctcttgctctcaataaatttttttctttccatactaatagtctgccattttttgatgaaagtaaaaaaaagaaaaatcaaaaaaagtcgctttttctaccaaaaattgctcaattttctactaaaatttaaaaaggacactttacaaagtgccctttaaaatagcggaaatagtgatattttaaggattttaatacacattataagatcttccatataggattaaaatttttttgaaaaaatttttaatgaccaaattaaaaaaattttttaatttcatacctaggattatagtttcaactgaagaacactaaatcattcctatacggagagacaatttgtatagttatttatgatttatttcaatccaaagcctatttttcttctaattccgagaatacatttgaaacaaaagagaatgctgataaatcaactttctttttatataatttttgaaaaaaataatacattttgtctgtttagctaccaaaaggctaccaataaatttgtaattattttcaataagtttaattgtgatatatcttattaccaagtttctggtaaattaaataatgctagcaacaattttatgtttatacgatttattttatacacacattctgtgatataatagttagtactaaaaaattactttgtaacattagggggatttaatgggtttaactaaaagtcaagtatcaaatttcctaaatgataaaattctctttagattctctatttctaacgaatatataattaagtttagagaacacgaagagatttttacatttgaagaacttgaaaaaattataaaaagaaactatacctattggagttcaatttataatactgctccaaataattttgtgtctgcttggaaaaccttaaatattaagtatgacacaataaaaaataatatttccgagtttgaaatgttagatattcacgccataacaaacctaatttataataatctaacaagtagttataatacaacagagcaaggtgaattggtttatgcaatctcaatagactctcctattgacaaagatatagaatttcgtagtataagaaaatttgtttccttctatattaaatattctcaaagtagtcttgatgacgctatcaaaagttttatctatctctccaagaacaacaatgctattggtagctatttttcaaactcatctcaacatatgttttatcccgcattatatctaattagaaaaaacttttcaaacgttaaagataatactgctgaacttgaaaaaaatatagtagatcctcttgctagccagttaaaagatatttcagatgactctaataaacaatatagagaaattacatcgttcatagaagataagtacaatcaaattcagagacaatttaatcaaaaagtttatgagtttaacgaatttcagaaatctatcgaaaactggcaaaaagaaaagcaagacaatattgcagatttagaggaaacctataaaaataatctttctttagaagctccacaactactttggaatgagcgtgctgaagaacataaacaaaaagccaaatattggacggtattccttattattacagtcttagctttaatatctgctttaacagtattagttaacgtgctccatagttattctttatctcctataaagaataaagttccatttatatccgaatcgtttatacttatttcagttatttcattttttatctacattgttagaatattaataaaaattgttatgtcaaatcatcatttagctactgaatatagacaaaaagctgctttgacaagattttatcaagctcttacctatgctggaactgacattgacaaagaagagcgactaataataattaattcgttatttagtagagttgaaacaggattagtaaaaacagatacatcaaatgatagtgatacaattttagctattttatcaaagaatttataataaaaacggcaattgccgtttttttgcttttacaaattgtctgaatacagattatttggattactaaaataatcgcagttactacaattaaagacaagcccctaatccatgttacttgactgtaccatatccgagaatatatttggaagaaaaaagcatgccgataaatcaccatgctttttatgttttcttttaaaaaataatacaatttgtctaattagctacccaaaatataccaaacacttttttattgaaccaatcataattaaattatgcgacaaacacatttttactaatctcaaccgcctccaatatttctttctcagtaattctttctctatcatttattacagattccacatgtttttcaataaaatctcttgcgtactttctactttcctttttcttctgaaacatatttttaagtaagttgtctaacttatcgttaaaaatagctttctgaactatttctaattcatcttctgacaatgcgacaacaattatgatatcaataaattcttcttttaattgagcaaacatctctactctatcatctacaataaattggtctgctattgctttggctccaattcctccagcaaatcctccgactaaggctccaaaaagtgcacctgctggcccacttaccataccacctatagctcctgcaccggctccagcagccattcctccaccagcaactgctacattctttagcaattgctctgaagagattcttccaacaagcgcttcaaaaaggtctggagtaatcattactgcaaatgtaataattgggagggcacgttttgcaagcacttctgctccaatctttttcccaataactttttctaattctttcgtacacaactttgcaaattgatctgtaaatgcgtagacactagttcccattactaggacttttagacctgctttcgtagctaactttatagcttcttcagttgacgtacctgaccatttggcctgggcaaaaataataatgaaactaatactagctccagggagggattgtatagttccatcaattacagcaaattttattgaagtaaaattccctcctttcgcaattagttttgcttcttcgtatgtaacataaccttttttaataatcttatttgcatcagcaggattagtaaagccctcaacttttccctctctaattttatcacccattatacgtaatgcttcatcgtactggtctttaggaacctctaattgcattcctttataacggtacatcccatcattttttaaatcaaatgcagcccgtactgaatctttcgcattttgacaatacttgacttgaatatcttgatttcctacagttctatctgcaccatttagggcgttatcttgtccaatgatatctacttttcggaaaggatgtttaatcctgtcaattagattatttgcatattcagcagcaaatccatgtccatttggatttcctacaatagaattagtttgaatatgctgaattcttttttcagcacttaatacaaaagaagaaagaaacgcaatttgagtcgaatttataaaattattgctacttaaattatttttcccaatttttaataactgagcatttaaattatcaacttttatatcgttagtataaccggatgaaataattgcctcgatatctggtattgcgtttttaaaatttccagtaacatttaattgttttataataccatacggataataaaattttatttcatttttagaattaattgttactttccataaacttgaaaatgggaaaaattgaacgtttactctatctcctccattcaattgaagtttctcaaagataccgtactgtgttagtaacaaaccatattccttgaagtcctcttctatggaactccttactggagaatatccaaaaaattcaaaatcagtatctttgaattgattataaaaatcctcttctgactcaataaaccatcttgccctaccatatggaacatcttctccagataaattaaaccctttctttgagatatttctcaaatagtgtctaattttatcttcatcgtgattatgagtatcttttattttcttcttccagaaaaaatactctataaaactcatgatactttctttgttatcctcaaaaaaatctaagaaaatatacgatataaaaactatagctattattacaggggttagagatttaattatatcgctcatttatcaaaaaacctttcataaattcattaatcttttccattttatgtatctgtttattcatattttcttaatacactaacaatttcttatagcccgtcatcatgccttttttaaaacctcatttgtcaaattaagctatacactttcacctgactcataaaaacttgttatggtgtgtgataattcaaaaatctcctaggaggtatatttctttatcagctatagtgataaagattttttagaaatattagtaaaatccatttgtttttgtcgatcatttcgccttatcttgattctgttcatctaatcaccacgtagccgggctatactacaagaaagcgacattaccatggtttgttgcgatttaatcttttatggttattgaaggaaaatacactatgtattttttttatatagtatagatgatttttacaaacacttagattgtttagatttgtaaaattctaactcatcgttaattcttataacataaaaaatgactatttggagcaactctaaataattttgtaaatgttcttcttctcttttatatccaaatttaccatgagaaaacttatttctaatttttaatccattgccatattttttatcatccaaaatataagataaataattactttcatattcagaaaaaagattatctgagtattcacaataccctttcttacaaagatcttctgcaatatctagtatcattttatctttatagtatagacaatatgtacctgtcttccataatttattcaaaatgtaaatttcttgaaagtttgaaaattttattacatcgtttgatagttttaaaagattcttttctattagaatatttatttgtcttatctgataatcatcaaaatctgtaatcttcacaccttcttttatatgtttgaagaaggttttatgttcatttttcgatgaaatgaagctaagtggactttgatcagaaaaaagcgcagagaacaatgcagaattatcaggagtgtcattcaatttgataaattttttcttattaaaggatttcaatgtagcataagaggaagtgccagacttaatctctaataaatcttggtcaatttctccatttctaaaaaatagttcgtattggtctaggatgctatccatttcacaaattatcgattttcctctttcgtaataagaagattctttattggaagcatggaaatgaaaaccttttatatctaactctgtttcaaggtaaatattgaaataccattctataatctcttcaacatcaatttcattttgttttaagtaatcaaaatatgcctgaaataataaattatgacaaagttttaattgaggatgataagaatcataataagcatttgatttgtgagaaaagtaacgagtgaaactgaatgtttcttcattctcaactaaccaaggcaatcccgattcatgattaaagaagccaagtaaataaatataattatttagtaatgtcggaaaatcatgatgttcatctagtataattttatttaaaagaataccattcttaataggctcatataatttatcagaaaataatggcttaatgccaactgatatagaatattggaacccttcattagtttcaaaatgtttttcccaaaaattatcactttttctcttagctaaaagtttaatctcatcatcaaactcatatttgcttaattttttatactcaacaattgattgtaaataattggggttaatactatctgtctgacaatattttcttgctagattatttatctcctcatttgtgatacctaatttattgaataaaccattagaatctgtgaattttccagattgatgattcaagaaaaactctatatttctagacagagagagaaaattttctttaataacttgtggaaataggtcaatcaactttgtaacatttttaagtgtcattgtctggatgttatattttttaatataagattcgaactgggaagcatcatctttattaatttttcctaaggtcaatactaattcccagaagatatctttataaaaaatgtcaatactatcgtaatctatttcaaaaatgctaattgggaaattcatggatatatcattttgaaattttgaaattagatatttgaatttagaaaattcattttcttttttgattaatttcaggactaaataggtttctattaaattattaatttccgtcgatggctgatacgcttcaatgtagttcagagctatatcatattgatatggctctattacattgttgggaatatgaaatctctgcttttgcatatctgtaatttccttcttgaatttgtacgaacctaagtgatacttaaaataattaagtatatcctgaagacctttttgttatttggttttagttatatcttcatacatctcaaacaatcttgcaactgtttcgctttcggttaaccatgttttcttgccatcgacaactttttgcattccatacgctctcattacagccatgtcgttagcttgatgtgcttttcgaagttcttttggcatagttaactcatcataaagatcagctaacgagctatcaggatacagtgcacgcgcatcgagtatagccatagcagtttcagaaatttttgctttttgcacatcagttacttctggccaagggaagttgttataaactatttttgcagaataacgataatcagatttaaggcgtccagcaacagtacgcatccaagccatgtgaacatttgaagttagaataccgaaatcgtagagagaagcatttggaataatttggaccgcatcacttgaaattatgctcccatcaatgaaaccaattggtatatatcttcgattttctgaagagacccttggaattagcagataatcattgtcattatgtcttatttcttgaaattctgttgccctttcagcactttcttgggtttgttttttaggactgttttgacgatattctttaactgattgtatcctgttaagaattggtggaatattccttaaaacactgggactaagtcctactagccacagacagtatctctctttattattaataaattccgatgctccatacacttgtcgtatcattgattcagcttgaggatatttcttaataagttcatttttttcttccggtgttaaaaaaagataacctccatctgttggtttgctgccatacaccattggtaagacttgacaaacaggtttgcttctactatcaatgaaagttagatcgccatcaattaaatatggatttatttgtctagcaataatttttgtgtcgttatcataaatcactttattttttgaattataggctactgaaaatcctataatcacacaatgtacagctgctttatttttagcctcgctattccacttaaatgttctgtaagcaaaatcaatatggattccaaatcgctcgtaaagaggtttccaaacactagctacttgctctccttgtgttatagagtttgttgataccaaagctgttcggatatttgtatcctgcatgagcatacttgccttaaaataccatgctgatacaaaatcaattttcccagctgtcttatacggtttcccattttcgtcaacataaacactcaatagattagctttttgctcaggagattgtaaagaatatcctaaaaatggtggattcccaattatatagtttagcttttcctttggtacaacagtttcccaatcaatttctaaagcatttccttcaacaatattagtgtaggatttaagtggtagaaaatcgatgttcgcaaagacaatatctttggtttcttccaacatctgactctctgcaatccaaagggctgttttagcaacagaaaccgcaaaatcattaatctcaataccataaaattggtttagtttgactttaacaaggtcttgccctaagtctaatgctactgcatcccccatataaagcttaatagcttcattttctaaacgtctgagagatatgtaagtttctgtaaggaagtttcctgaaccacaagctgggtcgaagaaaagaagactcgctagtttggattggaactgttttgctttttgttcaaccgtcttaggctgtttaaattgacgaatttcatttaactcttcttttagctcatttaagaataaaggatcaataactttatggatgttttcaatcgaagtatagtgcattccaccacttcgacgtgtttctgggttaagggttgattcaaataccgctccaaagatggttggactgatttctgaccagtcaaagctagatgatgcatgctctagaattagctcacgaagctcctccgtaaagtttgggatttccaacttattctcagcaaacatccccccattaacgtaagggaaagccagtagttcatcatctaagtatgggtcacgttcctcaatcggcgtatccaagattgagaaaagatctataagccctctacggaaatcacgactactgaaacgagcaaggtaatcatggaacatcatgtgatgaccgaaaatacccgcatcttcagcgtaaagacaaaacaccagacgaacaacaagttggttgatggcatgaagactatctggactctctggattaatatactgcttaagaagggcctcgtaaatctctcccacgatcgctccagcttcaatagaaaccttcatctcacgttctagatgttcatttgtcttacctatcaaaaactctagacggtaagcctctttatccaaatcagccagtttaattatcttaggttcaccatttggttgctccatatcataaacataaaactctttgaaattacaagttacaatccaacgaggacgtttagagtatggaagattggctgaatatcgtttagcttgttgaaaaggtgttaataaggtgttatctgattgtctaattgcctggtttaagtccttatctgcccccttctgctcaattaacaccttagtagtatcaataaacccgtcgataaaacttgtgtggtccatcttaaccttgtcttcaaatgtaatgtattctgtagggttttctacaccatacacagattgaagcaaatcaagccaaaatgattgactgtcctggcgttcatttccgcgattctcccagcgtttaataaattccttcgcttttttcttttgttcagttatattcatattaaaaaatacttccttaatttataacgttattataccatatttagttattattttatgctactagatattaattaaatctgctgttctttctgtaaaaataaacaaaaaaaatccatcaacaatgatggattaaaaactatgaaatattatttttatctagaagatgatactttgtgaaataatccttcaaagaaatgtccttctcctggactatttgggttagctttaaagtacagatagtcaatttctccttctgaaggtacttcagcgtaaatctgttgtcttatctctccatttgtcgtgattcgatcaacataaagtatattgtctttaatttcccaagtcccagtactactatctgaactactttcttcgctgtacaaaactttatgatctgattgtaaaactattgtctgatcttcgtcatctgaaatataggttcctggaaccgaatcttcattaccacatccagataggaatataacaaataccatagttaagatcattaaaattaaatttcttaatttcataatttgttcatctcctaaataatttatattacaagaacattattcatttttaactaaattagcacttggattattttcaacacttaaatcattaatttcttttagggctctattaataatgataaaaattataatccatgctaatattcccaaggcaatgtattgaaggaataatgttgaaataatatctgtatcccatgccccatgaagaacaattactagaattaggaatcttaaactttctcccgtaaatatagaactccaagtaaattcttgttgctttttcaaaaccatcattattcctgcaccggatatcgctgcccaagctacatgaccaccaaaggccaataaacctcttattatagcaattgttacagcattttgaggattcatattaaatacatggactatttgattttccatttgaaatggtactaatgaagaattaaaaatataacctgctgtttcaaatactgcaaatcctgctccaactgctcccccaatcaataaaccattaaaaatatatcgcttatatttaaatttactaataaaataacctgttgctaatattttcgcaagttcctctatcaatccagtcatcatagatgggatcaactttccagttccacttggaaaaatttgtaataaaacatgagttattagtaatgacaatataccacctataaaaaatatttcaaaaactgtcattatatcaatatttctaggtgagttacattcaaaatagaaaaacagtactggcatagctcccgtaagggcagcgacaaacattaatcctgggaaaatatttgtattaaaccatgtaacatatatgaaatataacataaaacttgatatcaaaagtagcaaaaatactcttgcaaaataccatggtttaggccattcttttgaaatgttttcaggtagaggtgtagttgtttttgaaccacaagcaaaaatattttcagcttcttcacgtgtatgttttttaaaaacttgactaaataagtccctcatttttaactcaacaacaccctcaccacctgtaaaactattaattctatcagcaatagaaccagcaatattactagcagtatttaacatccctgttccgtccatttttgtaccacagttaggacaaaatattgcaccattttcatttgtacaattacattttggacagaccatagatgttgattccgaaaccatgttgtttgcttcttctgaatcattaactttttttatagattcaacatttattgaaaattcacctttttctcttgcttcttgaaattcttgagcagttggaattctaccatttactgcttcgaaaaattcaacccactcctcttttgtcattatgaacctctcattcccctattttaattttcttttcttctagttcttgctactaaaccaaatcctgctagtataactcctaaaccaagaatcattagattctcttctgaaccagtaattggaagtgtcggaattgcctcatatttagatttcgtccctcgataaatatatctactatctgaaacttcattaatagttctatgggttatttttttatcaatattagaacgagtgtgttcattagtagcattgtggtcagaaaaaatttgacgatttactatttgtgatctttggtaagcaagttgtactgcttcatattgtgcagttgcatccaattgatcttgtagaagtgtgttaagtttagcttcctctcttgctacattctcaagtgctaaacgatgctcttcaactgcattgtcatatgcatcttttgctttcttcaaatatgcatcagcattttcaagatgatccaaaagtgtttctaaagcgactaagttagtctttaatttagaaatttcattcttaatttgactttctttagcttttaactcttcaactttattctgacgatttctgagttctgcttcatccgtagctttttcagctttaagatctgaaagaactttaagttctttatccaaatctgcacgcgcatctgctaaaactttctgttttgtttgaatgtccgcatttagattctcaactgctgattgtgcttttgcataacgagtcttggcagcaaccaattgttgagaagcttcatctagattcttttgtgcaagaggtgttttatctgagattgagtttaatcttgcaatcgtttgacgtgtagtatttaaggctgtcaaatgtttttcatgaatttttgtaacttcatctaaattgtttcttgctgtcttatctgctactcttgctttttcaagctcctcttttgcagtttctaatgctttttgcttaacttgaaggtcagcatttaagttatccagagctgtttgagctttgatatatcttgtttcagcttcttcttttagttgtttcgcattgtcgtatttcttctgtgcaccaggagtttgatctggaactgacattaattctgctacaagtttttgagtttgtttcagattttgattcgcattttgattttctacttttgctttttcaagatcagatttagcttttacttctgctgttgtagcctggtctaaattatcttttgcatttgctaaagcttgacgcttgttttgaatatcagcatttaattgatcgagtgcatcttgagccttattaaattggatttgtgcttcattataattttgtgtagcgattcccaatttagtagtagctgcaggtgtttggtcaggagtagctttcaaagcatctaattttgctatcgtttctttgagagcttttgtacttgaatcattttctgatttagctttttccaaacgattctgtgcagaattatttgctgtatttgctgcagtctgtttagctttagcagctgttaactcatcttccatttttgaagtatcaaatggagtagctagaggtttagcaatccctttatcataatagtcgtcaatgaacttagagtgatactcacctgtttgttcatctttaatgtaatcaaaatggctagattgacctttgaatttaataaaatgcattcgaccaacaccactaggtgttaggctatttgctaccccgactgcttgtatatttgaaggagctttctctccaatcattaatctcatatgtccaaaatatgcatgtacatcatttgtcataaagctaattacagcatcatatacctcgcgatacaattgagacattgtagcttttcgtgtttcttttgcttctgaataataagcactaaaacctagtaatgtattattgaagctcatattttcgccagcccaagcgattgaatccagtccatcttttgcaagagctgtcacactatgacttgtaccaaatggtttattttcttcagcataggcttttgcgatatttttaacaccttgaacagattctttagtaactataaaatcatggcttccccagacttggtcttgcagattgtttgcgagaagcacataatattgactcaaagcttcaatctgtttatctgtaagattatccaaatcgacttcagagtcatcgataggcaaaacaatatccttatttggccaacctttgataacaatattttggtgttcaggagaatattccgtctctggagtaccaaaatcatacttactacctgtgaaccatttttgaataacatcgtttaatgcatttttatttgcatctgagttatcggcaagataagccttgtaagcatcaatgacatcttgaggcaattgaggaatagtgagatttttaattgctgcaatttgtttattgagcgtttcaaccgcttgatcagccttctctttattctcttttgcttcctgagctgctgatgtagcactcgctaactcatttgaagtttcatttacttttgcctcttcttggtttttcttagtagttaaagctgaaatttctgaagctttcttagcatcattttctttagctgttttgagctcttcttctgcactaatcttactattttgtttatttgctaaatcatttgctttgctatcacgatttgagattgtttgggcaagttgtgattcagaagcatcaagattactttgcgctgaaaccttattttcttgagctttctttaaattctcttgtgcttgtttttgtttttcctcagctgatgacaagtttgctgcagtttcttgacttttctttatttgatccgcttcaacagactttgcattttttagtgcagttgcttttttatcatccgcttctttggcacgatcaagttcttgtttcgctgtattttcagttgctgtattagcatctaaagttttcttagcagcatctcgttctgctacaatttcttcaacgccagtaccgtctagaaccttctgagcagtttctttctctttttgagccttcactaatgcatttgctgctgcttctgcaacctttttagcatctgctaattgtttagcagaaacttgacttgcactaagttgcgttttttcatcagcagaagctttactgagttcttcagccttatttttgtcttcgttaatggcattttccaaagcctttttcgctgttgattctgctgattctttttcagctacatcactttttgctttatctctttcagcaatgatttccgatgctccagtaccatcaagattcttttgggcagttgctactgcttcctcagctgtcgaaactttcttttcttgatctgaaattttatcttgatcttttttaataacatctgattgctgattatgttctttctcagcttctagaactttatcagatgcatatttttctgatgtttcctttttctcaatatcagcttttacttctgatatttcattcttcgttttttcaattttttcaggcgtagctaattctttatttgcctcagcattctttaagtcaacatttgcctctgtaacttttgttgcagcagttgcttccgaagccttagcgttttctaatgcactttctttatttgaaaccgattgatccgcttcttccttgatcgttcttgcttcttctacaacttccgcagttggcgttttcgttacagttgcaactccattatggacaaatactccgtctacttgttttatatttgtagacgaaggagtcgtagattcaacacttaatgttgactcatttggctgagttgcagttacttcatccgcttgtacaacagaaattcccgcaaaagctgtagctattgatactgcagatacagttgctttgatcgttttctttttcataattcccacctttatgatagagtattgagcaaattatcactatataattataaacacccgaattatactatattttagcaactttgtaaagttgtaaccaacctttcaagaactagaatataaccttctaagactgtaaaatagtcttaagaggtgagcaatgtcagaattacaaaagtatataagtaaaagaatacggattctgcggacacagtcaggaatgacccaggagcaattagaagaaaaagcagatcttggtaccaattacgcatataagttagaaaatttagagcccaatataaaaattagtacgcttgagaaaattatagaagcgttaaatgttgatctacaaactttttttgatttaacacttaaagaagaaagtactgacttagcacagcttatcgacactatcaaatctttaccagagtacaaacaaaataaagtcatttcagctattaacacaattattaacgagacaaaataaaaaagagtggaaaaggataagtataataacgattcctttcccactctttttgtgcctaaaaatatggccattagctattagagcctgcgattcttgggtaaccaaacgtcatatccagcttgtcttcctcgtaattcttgatcaattcccagaaatctgcaactgataactctgcaactgattcatgccaattgaatttaaaaaacaaatctaagagaaatttcattacttgatgtactttggctgactgttctacagtatcaaaagtaatcaaaattttctcgcacaatggatcaattaattcaatttcaatactatcatttacaaaattgaatgacacttcttgatcctggtcattcaagattgagatatactgatcctcttcaaatgttgaataaaacattctaatattgacttcttcattgtgattaattaactctgtaagatattgtttggttacaagaatcacatgttttttgtaatttttcattaactttacctccgattattttttaaaaaagttttttcatctgtgaattttcacggtggtctcactctctctaatattattattaaatgattgttcttgatcatctgctatctccttaattgaaaacaaaaaaaagacagttcaccactgcctttctttttttatctatactattattatgccatttttctgtaaaaataaagatagatttttcaaaaaagtactatagaatgctcttggccccagaggataaattttttgtctaggttttggggtcagtacataacaagaagatttttttatgtttttctaagtacgtctagacgttttaaaacttatgttgtgattgaattacgttcaatacttcttgcatacttccagctttccaatttgccttagcattaaataatggttgagttaatttgcaagaaccgactccagtgaaatgatcctatcacattgccgtgcttgctccatgttatgcgtaacaaccaaaattgttttaccaaactgatctctcaaagttcgaatcaaatcgaatgctttttgagacatttcaggatctaacgatccggttggttcatctgctaggacaatatctccgggctttaaaatagctctcacaatcgcaattctctgctgttcacctcccgataattcattgattttactatttaaccgattttgtagaccaacaaattctagcgtttccttgattctctgctccttctcctgtctagagaaattcgaaaaagtcatggcaagcatcaggttatctttcacactagatgtagaaatgagtgcattggattgaaaaagatagttgatgacattccttcggtaatgaactgctgattgcgaatttaccttaggcaaaacttttccgttgattaggattttaccactgtcaacagtatccaatagtccaatcatattgaggatagtcgattttccagaaccagaaggtcctactaaagctacaaattcattttcctcaatatcaaagcttaagtctttgaaaatttctcttgaaccaaattgttttgatacattttgtactgaaattctagacatgagattactccttaaatgattgtatgatactctctccttctttacggaacaaactgaagtaaagtagcattatctgaaaagcaaatgtagctagtgtcatgactattcccaacttagaacccactaagatagaaacgattagttccatcacagaaaaactaataatgagagaaagcacaccaatatatcttttccatggtgagaatcccataaagtattgaacatacaatttttcttcaaataacatgcggtacattaagacaaaactccagaaaatagccatcatcgtaattatgataatcgctatgatcgtgccgaaaagataaaatgtataactcagatctttttgaagaccattgataaagttcttgacagttgtaaaactcaaccgattatcctttaaatctggaaattctgtttctaaaatggacactacctgtttcatcgtttccctatcacgaatcttcaaaagaccattatagccactgacaactaagtttgccgactccatgaaatataaattctctggtgttgagacaaaaataactggattctcactagttgtaccataagaaatagaatctgaccaagtaaatattgatcgagacggttggtaaaccttgaacataaatttcggattttctgtgaaattagtttgtaaatctcccggttttacagtgacactttcctgtaaatacgccttcatcacttcaagttcttctgtattgagcgtgttaggtagaagataaagtcgagtaccattcctcatctctagcaactcttcatcacttaggggaatacctaggtctttcaggtaattataggagaatttcaaataccaaaatggttttttagggacatgctggtatgtcccatagactgcatcaagggactcctgattaagaaattgtccttgggcaatatagacacccggaagctcagatatacgctggtaaaagttatacatactacgctcaagggaatttgtagttcctgcatatgtacctacatcatctccctcagcaaagctggagataacgtacatatcttcaacattcttccactccctagatactttcatattatcaataaactgattcattggagcatctaaagagtaactgattgcgattaacaaaccagctaccaaggtatagaataacaagcaggttaccattaaaggcttcattggtaatcgtttatgaattgctgctaatggagaaaccgaataaacaataattgttggaataatgaatatcaatagtagcaacaagactgagaggctgactccagcaaaaactagaataaacgatgataaaccaaaactagaccagcctgacaacaaccaactacataaagagataataggaataatatagattgaaaatagtagagaatttttgaaaaaagcagaccataattcttttctatcccatcctaaaagaatcaatgttccgaaatgtttaaaggattgaagaacacagattaagaataggatcagtaaaatgaaggcatttactaagatgctgatagcaagtattattccccaaattccctgatcagtactacttccaaaactttcttttgtcaaatcctcaacagaaatacctgacacctttgaaagatgcagcaaaaagttatctcttgagacagcatcgcggagaccattgatatggtagatcccattaatcgtattagtgttttggaaagtataatctaatcgttcaatgactacaggtgtgctaaataataaatctggaagctcgtaaagcatattatttgagcctttgtcaagtccaatagtcatattattatcactatgagataataaatttgcaaattgttgttgtgagacaactattttacccgtactttcaaaatctgaaaaaccagcagagctaccaaggatgtctatataaatcctatttagaccttctcctgtatcactactttcagaacgttttgtccatatggacaagtcactctgttctaaaaaataattaaatacatcttgtgattgcttttctgttaacttctgaagataaactgttacggtcccggaatgatgattataactctgccatgactgttgatactgtaaacctgctaaaaaaattgccaccagagcaagtaagacactctggatggcaatcaaaaacaggattaagtatttcattttacctaataacatgtttttgtatgtcatacgtacttacctacaattccacgtttttttctcacgcaatgaaacccctttcagcttccttgtttttattttaacatatatatttttatttagccaattttttattgtttattgaactttttttatttttattaccataaagaatattttattcctttaacttgctattttgaactaaaaattttataataaaattaagcaaataggaaggtttattatctttaatgaatacactcgcagagagattcagattgaaaagaaaagagttgagactctcccaacaaacgcttgcagaaggaatttgtgaacaaagccagattagtaaaattgagagagggcatttcattccctccgcagaccttttgttcaaactctcacaacgacttgaagtgccattagattatttttttaatgaacaaattgaaattaaatctaacctctctaatttcaagcaattatctgctcgcctattagatgatagaaattatgacaatttggaatatatttataaaatagagattgaacgaagcacttttctaacactagaagaccgaacttaccttgaatggattaaatctattattgacttctatcaatatgacagtaagtgtgaggctatttcttcattggaaaatatattattaaaagtctcctcaaatactctgatttatttaaaggcattgaatactctatctaatttctattccttagtgggtcgtgaacaagaatatgaggcaaactactctcatttaatggagttatatcagacaaaaaattttgagcatcaagagtttttatttggttacatcagagttcgttacaactacgctcactacctagtgtcaaaggaaaaatataacgaagccatccaagaagctcttgagacgattgaactctgtaaacaaagacagacaagctaccaactagctcccctacttattcttgtaggaaatgctggagccaaatttctagacaaagaacaagtcaaaaattattatatagaagcaagagagttatgtaagatttataacaatcctttaatgttgatgaagatagaaaattatttgaaagaattagatactgtttagttaatcttgacattatagtttttctgaaacgttaaataacctgtaaggctgatagtgaaattaatactatcagccttataatttttccatggtatcttaaataactatactgattttgtttcccgttctaatttggtaacattttgatttcttgtgttatcaagtatatggtagaaaaagagttctacactttcagtagaacccttcttattagcagtattttgattacctagttttttctatttttcctaaattaaaataagaaattattgataaagttctcctggaagattgttcataaaaaagtgtatctttggctagagaaaatcacaaaatctaaataaaacagaagacacaaaatatttataatatgtaaaaggtagttcaaaaatatagaactaccttttgttgataataatgaaattagatacttgttcttttgaaattagtagagtaaaaattgctagaggggaatcatcaaactgctttgatttagctatggttattttacttttgtggccgagaacaaatggaagatatgggattacacagagtgagtatttctttttgttttgattgagacacatgagtatagatctgagttacagaaatagagctatgtccaagtatttgctgtatataacgaatatatacatttttatccagtagcattgtagcaaagctgtgtctaaacatatgtggcgtgatagttatagataagttgtttttcttaaccatcttccttaaaattagacgtacgctttgttctgacagtgctttaagaggatgagttcaagtaaatgttgcacttattcttgcaatttatcatgtactcataaattagcccttcgtcacttatcaattcctcccagttctctcaaccgttcctgtcccaacttcaacatctctttttccaccttattccattttccaaataggcattcgtgtaggactactgctgctgatgtttcgtctacttgcgaatcataaacacacgattgatctcttcggtaaatttgaacttgattaaaaatcttgtcattttctaactctcgtaagttatcaactaaatgttctacaattccatcatggtgctctttgggagtcgctctcgcttgacttgggtctattgcatggagctcctcataacgtatcaaggtactgagataggacaattctggcttggtcgcaattactgcaagtgagacttggtaacctttagttgtcaataattgtgacgtttttctagggacttctgttgttcttaaagtaccctcgattaacaaatgataaccttgtttactcaactcatctacaagatattcaaccatttgtcccgcgaatactttggtataatccacactatctttgccatacttttcctgtaggccaaggtagttcggatgaaaagagcgataactatctccatcaatgataatgatattaccttgaaattccctttgtttaatacgatgaatcgttgttttcccagcaccactctgtccaccgagcaagatagccttgggctgagacgaagttgttttaccacgagttaaagaacgaacgagtcgtctggatgctcgttcaaaatcatcttgactaaattcttctagtttcattaagccaccaccagatgacgagcttgttctagcatccgttcaatgccatccaaatagccaatatatcgctccacatcctcaaaagttgcaacaagataaatcttcgtgttaatcaaatcagaaagatcatcgcttattagaacccaaggattattagcatcattaaatgcaatttctagttcatcttgtaaacgataaagttgcgctaagatattcgcccctcgttctttaatcacttcaattttcagagttaactgataatcttctactggcgtgagcatcttttcctctcctacaatatcgatataagaaacattaaatttctgacaaatacgatctattaattctgtcgaaactgaacttgtcccgttttcataacgactcaggctatttcgagagatgccaacaatctttgcgaactcaggctgggttaagtcatgtgttttacgtaacgctttaatattttctccgatcatgagagccctccttttatttatttctattatagcattaataatttaaaaacgcaccattattggtgcgtttttaaatctggtagatgaatctttcttcaatctaacctgctgatctcagtatgttaaaactaatccaaatatataattttatcaaaaagagatcttatattttcatctagatgatggcttacaaaaataacagttttttctgtcattgagaatagatgtttctcaatttgataccgtctttctttatcaatcgcatcagttgcctcatcaataatcaaaattggtttttcttcaaggtaagctctagctaaactaattcgttgcttctgtccactagaaatgtcttggctaatttccgataaagtagtttccaatccatgactcaatccattaatccagtctcttaaataaaatatttccaatgctttttcgatttttgaatcttctatttcacggcctaatgtcaaattaaataaaatggattcgttaaaaatatgatcttccaaactaacataagaaatattttcatgaagatccttgaaattcatattttttgaatcgatattatcatagaagatgcggcctttcgaaattgggatttcaccattaatagcctttaatatagttgattttcctgaaccagatgaccctgatattgcatacttcttatttttttcaattttaacatttaaattatctaagacaatcttaccatcacgttcaatagttaccgattgaaattctactttatctataaatttcttccaagtttgtttattaacattactttcatgaatactttggtcatcttccaattcaaatttttcaaatattttgtttacagttttaaactcagcgtaatttgccgttaagcctgttaagccagcaaagataattgatgaaaaatattgagaagaagatacagccccaatcggaattaatcggttaaaatataagactcctgcgtgggtcaacatggcaatttgactcacaaaactagtcccattttgaacagacataagcccaccaaaggtttttgaatatgaaactctggacttcgaatatttttttgaataagataagatttttaccattaaaaaatgaagttgattagcattggataacattcgaaatccacttaaagaatcatcaattgctttaactaattcttcattcttctcagtaaagtaaacagctttattctccattttctttgtaaatattttaggaagatttaccattagaatgaagaatatcaaaattgtaaacaataatgaataatggaaactaaaaaaggcaataattgcaaaaatgatatttaatgcttgactaatcattaattcaagtgtttcaaagccaagatctcgaatagtattaagatcatttgtcagccatgaggtataggcgctaacactttttgagccaaaacgaaccacacccttactttcaatactttttacaatatctttacgtatttcggtacacatttcttgtatggctttttcacttgcttttgagttttgatatatttgcaatacccatattaaatttacagctaaaatcgctccacttaaatacaaaaatccctgtaaatcaaaatttacaattgtagagattgctttggcactcaatataccatttaagtaaacacataatgaattaataaaaatccaaaacaaccatatagaattacttcgtttgcatctaattaaataagtttttaatgtcatatcccagcctcatttaaaaattccaaatatttcttcaccaattatttttctttgatatttaattgcaatataagataataaaattcctactaacttttagggcgcagttcagagtagtcgatttctatctatttcctttattattaacttgaaattttctagcttttttttaaacttccattattctgtttcatagatatatttttagaccgctgatcaactttatgttcttttttaaaattattctgcataactttctggttcattttctattcccttactttccttaaatggattgttaataaataacaaataaaatcctactaataccgtaaatatatttatcgttattcctagaatatgtatatccgaataaaattgaggaactattaagaatacaattgaaaataaagcatataaacttgaattagtagagtagattaaccccatattttcatagttatattcagaataaatcattttttcaaacatattaccagatataccaataattataaaggataatccaaatagcaaaagcttaatcaatggaattggtattacaaatactaagaataaaaagaagcccgatacaatataatcaataaagaaaaacttcttatatgatatttttatcctaggtgccacaaaagcacctgtcaaatctgctaatcgttgtactgccaatactaacccaagatactgaatgggaattccttccgatacaagatataagggggctaaagttaaaagtagatctgttccaccacttaaaattgactctgtaattacaataaaagaggcaaattttgattctcgaaaagcagaaattgtgtccaaaagttgaaaagttaattcactttcgctttctatattttcagacataccatctgacttttttttatcaggcatattcaacctgattttcatcataaagtatatcgcagctacaaaaaatggaatactcatattgaaaacaacaaaataggataacactcctaacagtaacgaggcaaacaggttactaataatgtctaacacatttgaagccatatactgaacatctatagatttgtttatcgtttcttcatcattttctaatgtttctggaacaatcttcatttgtaatgtgttgagtagatttgttgataaactaaacaaaaaattaaaaatataaagataaaaaacttcaaagcgatatcttaagcatagaatagtaatgaaaattataaaaagttgaagaacttgaaaagttactagccagactttatctctttgaattttatttacaaaacttccataaaaaacggcaagtaagttagggataaaacctattagagtaaataaagataactgaccagcttcaatattataaacattgattaaaccgatcgacaatgcaatgaagtaaaaactatctgcaatatttctagaagatctacctaatatcaagtttttaaagttactactgaatttttctaatatcatgtttgtatacctcgaaattcatacaatcgatttggatataatttgttatatttaataatcctgtcaaggaatccaatactttgtaggaaataattgctactgccatatacgatatcggtgaaattacactgtatggtgtcttactattaattttcttgcatttattttagcactccgtcatcatgttgtaaatatctttttataaactttttttatttttttaaaaataaatcatttttgtatctatgcgatattaaaaaaacgatgctcaattgaacatcattttcattattctgtcatatttgcaatataatgttcgactttcaaagccattgacatattttcatccaatttataaagaaaatgtgctgtctcaaaatattcttttaccgaaatcttagaagaaaagtccttacttacatttcccatcaataaatacaaatcagctaaaagataagttgttctgtaagcctgacactgctttatagtagctgtgattttagtaatagcttcttcaatattattctgtagccataaatatctacaaacgttatagttgaacttaataaatagttctaactcttcgagtgtatttaaattgagttgatttacttgatactctaatgtttttcgaatctcatcaaatcgcgttaaatctccaatatcgtaataaaaattgaatagagtgtttgaaatttggagatagttcatatcagatatacttaactgtgacagcaccttctccaatctttcaactgcctcctcttgttgcccatagaaataaaaatctatcagagattttatccactccatataaaatttatctgctagagataaacgatgagactttacattttctaattcatatatatatttcaaagactcataatttctatttatgataaatgtatgtgctaatttcttaaactctgctagctcatcaacctccccaacaatctgctcatcaaaaaaataatccatactaacttttaatttcttagcaagtgcatgcaaaaaatccgccccaggagtgaactctccactctctaatcgactaatttgcccctgtttacaaatgccttcggccaattctcgctgggacaattttaattcttttcgtctattttttaatctggttgctaataatgtacccacgtttggatattccttttctaattgattttgatttcaattttaattgtaacatgattaaatcaaaaattcaaatatatgtccagaaagatacaaattttacataaatggtgtcgaatgttttttgatctacctcgtcttcttttgaaaataatctactcaaataatttctagattgtcaaattaagttaaacttttcatgtaactcagaaaaacatatatggaatttgagagttcaagtaattcctaaaagtctttgaaattaaaaacgcataatatcaggtattcaaaaaactgatattatgcattttattttagtctaaattagggggaaattatttccagataaagtttttggcaagcttcttatctgtttaaggtacatctccccatcgaaatgagcgagctactcttattaaacgatcaaaagagttaggtttacctaattatggttttcacatattccgccatactcatgcgtctttaatgctcaacgctggagcaaattggaaagaactgcaagaacgtatgggacacagatctatttcaaccacaatggataactatgcggaattagatcctaaccgaaagaatgaagcagtcgatattttaatagaacgacttgcacaaattaaaaaaactaattagagactattatatttagctataataaatcattttgcaattaatgtaaattttatattgctactataaaattttaggtatacaaagacctatagatactttattggtaagattaattttataacattactacagttaaaaaaatcctacattatagtttcaattgtaaaaaaaaactcattattgataccggaatgttctcagagatttttcaactacttttgtacaatgtaagtcaaatacaaaattacctacttaataatatttttttactactacagttaacaaacatattaagattagtagtgaggaagtttccgactggagagagtactcactactttatcttatcatgaaaataattcaattttttcttagttcaatgacttgatcgtatcgactttcattatcaatatggtgagcgatttctaacaccatcatcggtagtgagaaaatcaagtctcgaaccatctggctattttctacgtcaagagctgcagttacctcatctgctaataaaatatcctttttacgaagaaggaagcgggctagttcaatccggactcgttgtccacctgaaatattttctccgttatcagtgattacaaaatcaagtccatcagttagttcatggtcgagtttgacctgtctcaaaacagtctctaattcttgatctgaaaactcttgtcccaaactgagattgtagcgaatagtatcattaaagaggaaaggatgctggctgataatgcctacctgacgaacaaagtgacttgttttaactccatcccttgtacgacaagtaatcgttccggcatccggcttttcttctcctgtgatcattcgaaagagggttgatttcccacagccacttggccctttgatgaggactttttcaccttgtcgaatggctagattaagatcgcgaataatctctctaccattataagatttacttaaatgagaaatttctagttcttctacttgggagatcgaatgattgtccgattcactatcatctgctcgatttaaaattccgaaaatcttttctgccgttgttttggctccttgtacttcaaccacatcatacatgatattttggataggccctaccagttgaccagcagcaatatacatagcaaccaggctagccactgaaacatgatgaccatgcatggcaaggaagaaccccaataccaaggggagtacttggctaagaaagaccatgaaaccattacaaaagaaaacaatattatgggtaaaagcaaacttttgaatggctcgttgataacgaagattgatattccagacgcgctgagaattttcaggtaaggcttgattcatccgcaaggtttgagcccctcgaatactatcagagatttggttatgaacagctgttcttccctgagacatttcatcccctgaattctttagcttattattcattaagaattgtggaatgggacgtaagatcgtgaagaaaacaaagatagaacccaataaaacattttgggcaatgatatagatcgccgtaatcagcgctccaaatccccaacatgaaatagtcatatagcgttcaaaaaagttatctcctaaaaattccatatcctgtgtcagcatggtaatcttttcatcttcactatattccctgtcttccattaacttatgaaacaatgccgttcggatattcatgtgaatttcacgtcgaaagacattatttgcatgattacaaaataacattagactatacaaagagaaatagacagaaaaaccaaagagggcaaatttccaaatagaggaataggtaaggttattttgatctatcgatagtgctttggcaacaaccaagggttgccctaatgcgagccccccatttgccagtgctccaataatggttaggtattttgtttttttatcaagatatttaaagatattaatcataaagctctcctagaaaatagaacactatggttgagaaatatcagatgtaatcattaaatcttattacatattattctttgtgatatattttacatgctcattatacatctaaaaataagtctagtcaatgaatattcaaaagattagaaaagtttaaactgttaatgatattccgagtttttcccagtaagtattcatcttatccatcccaataaaaagttactgttggaaacatataggagattagaaactatggtatactagtgataataaatagttatcggtaggagaaatctggcgtgaataataaaaaaataagagtttttttgagtagacctaatccatttactaaagaacaacagtactttatagaaaaattaaaaagtaccttagataagtacaatatcgaaagtataaaattacagtataataaagttaactagtcttgtaaaaattattttatcgtcatatctgagagttaatcagctattgcgtgaaaattatcaatctttggctgagatacatttgtcacaatcataaatagcttatagttcttgacatatagacttgtatatgaaaaaatacttgttggaggctaataatatgactgaaaaaatcaaaaactgggttaacatttgcgttttgaaaaatcaagaaattttattacttaatagacagcacgataattttcctggctggattccaccgggtggaaaagttgaatttcctgaaagtttttttgaagctgcattacgggaacttaaggaagaaactggacttaccgcattaaatcttgaattaaaaggaatttcaggctttactaattcaattggtaatgagagatttgtcttctatgactttttatgtactcagtttactggtgaactaagcacatctgatgaaggtgagccaaaatggtggaatctaaaagaaatcgataaaataccaatgcaagatgaaataagaaaaaggctacccctttatttaagaaaaggaagctttgaaagtattaactattgggatgataataagaaatgcattagcgaaaataaaacaattttatttgactaatattctctacagtataatcaaatgcaaaattctcaatccattagtaatttttgtataattcagtactcaatacaatctgtctttaataacatatagtttaatattttacaaaacaagggtatctaataaaatcatctactctatcaactttttccttgtatatatagatagctaaaaaagccttggaatcattccaaggctttctctatattctattgcatcaattttcttattccgatttcagttgcgataatttcacgtatatttaaaatagatacttaaattatattactgtttttcaaaagttccgtctgctacacgaaaatcactgttaacagtttcaattgaattaaattgaatctttaaatattttacttctttttctgtcatgagttagcaggctctgcctgcttagagttttttttgcctaaaaatatggctattagctattagaacctgagattcttgggtaaccaaacgtcatatcgaggttatctttctcgtaattcttgatcaattcccagaaatctgcaactgataacgctgcaactgattcatgccaattgaatttaaaaaacaaatctaagagaaatttaattacttgatgaactttggctgtctgttctacagtatcaaatgtaattaaaattttctcacacaatggatcaatcaattcaaattcaatactatcatttacaaaattgaatgacagttcttgatcttgatcattcaagattgagatatactgatcgtcttcaaatgttgaataaaacattctaatattaatttcttcattaagattaattaattctgaaatatattgttgacttgaaaaaactacatactttttatatgttttcattttgttttcctcctattttttaaaaaaagattttttcatccttagatttacggtggccttactctctttaatattattattaaacgattgttcttgagcatctgctacctcctttttttaggaacaaaaaaagacagttcagcactgcctttttttatctatactattattatgccatttttccgtaaaaataaaaacaacattctgttcctaaaataacgatgtttttcttctatctttatttttatcaaaatatggcatactattattgtaaattaaattgagtaagtagagctactaccattaatcatatggtgagaaagtttgttactgggcacggttaacgtacttatctctcatatgctagtcattgcaaaggaaaaaactaagagaaaaagaaagaaaatctaaatggttattctctactgaataacatgaagtaaagaataaccatttagtagataaaaaagtaaagaaaaacgtgtttaaggtaaaataaaaaaggtaaaaataaaagtaaatactaaaaaaataactagtttagcaaagtaaaaaaataatgtaataaaaaatgtaaaatagaaaagttttataagctcgaacaagcaatgacatctttatgatacttccaaacatagaacacggtgagtactgaaaatctatcgcaaacattaaacttcaagagttagcctcgatgggaagtatcaaaagcatacccagcttattaaaaaagggtgggaggcagtttaacaataatatgtaattattttagaaaggaatgtataatgccaagaaaaaggaattctctcaagcacgatttatttattgcagcttcaaaaaatatcacaaacaatcgaacgaggacaagctataaaagagcaattactcgctttacaaagtgggctaaagaaaacaatattaagaaaaaaacagatattactgaagaagtgattcaactataccaactagatctaactgatgatcctaaacaatattctgttgctacaatccatacttatttagcacctatctgcaaagcagttgatatcaacatgaatcgcattagaaaagacaagcgttccagtgacaaaattatccgaggtcgtatcaaatcaaaaaactcacaaggtaaacatcaagaaacagactctcgcttctctcggctggttaattttcagcgggcagttgggattcgtagatccgaattaaaaaaattaaaaggaaaagatattcgaaaagataataatggaaattactatgttttagttcagcgtgggaagggaggaaaatttcaacctcaacttattcttcctcaagatgttccagtagtcctcgatatctttaaaaataaacaagaggatgattatatctttacagatgtagaaatgaataatctaatcaatctacatgggatgcgagctcaacatgcaagagagtgttattacttctacttgaagaaactccaagacaatcctaaattcaagctgaatttaaaaaattttttaatagaacgttgggaagttggccaccaaaatttaagaaataaatcattaaagaaatttgagaaacaaaagaaaaacttcattaatgaactaagagatgaacattataaaattcgtggatcgaactataaaaaagccttaaattcagccctgcctacaaaatataatcgtttagctttgatggcggtctcggtcttccatctttcccactggcgtctatccgttacagtgaccaactatattctttaaagtatctcattttcgactaaaaaatgaagaaaaaatacagaaaaaaacagtttttctgcgtttttatggcatactcaaaatataggctgttgtatagctaacagttttaacacatttttctgacatactataaatttaaaaggagtaaaagaatgtcaattaaaaatcatttgcaacgagaattcaaaggttcaaattttgaaattcgtgaaaaactaataaccgatacttacttcactagctttttagactacgtgagtttccctgaatcaatctcaaaattaattgaagaaggctatgctgatagaagaaatcaactagatgaatacattgattttgcacttcatcataatttaattacttttcaaaataatattatccaagctactgatcttggtttagcttgggtctggtgggcatatgcaccagttgaaggcaatgattggatttaggttaaaatagcactataatttctgcatatcataaatctaacaaaagaattatagtgtctattttgttgtagaaaaaatccccgccaagatctaacttggcggggatttgatggggaataactcccctatttaagatttaaatcaccttaagcaattcttaaccttaatatactaggctttcgcattcaatttgcgttactctattatttaagagtaactgaagctccagcttcttccaatttagctttgatttcttcagcttcagctgtagcaacaccttctttgataacgccaggtgcaccatcaacaagttctttagcttctttaagaccaagaccagtgatttcacgtacaactttgataacgccgactttcttgtcgcctgcagatgtcaattcgatatcgaatgaatctttagcagcaccagcgtcagcagcaccagctgcagcaacagctacaggagcagctgcagttacaccaaattcttcttcgatagcttttacaaggtcgttcaattcaaggattgaagcttctttaatttcagcaataatgttttcaatgttcaatgccattgttatttcctccaaataagttttaattatatatttttattttttgtagctaggctacgctgcgtagcttaagattaagctgcgtcttctttgttgtctgcaaccgctttgactgcaagagcaacgttgcgcactggcgcttgaagtacagaaaggagcatagaaagaagtccttcgcggtttggaagagttgcaagtgcaagaatctcttctttagatgcgacagcgccttcgattgcaccacctttaatttcaagtgcttcagcgtctttagaaaaatcgttcaaaattttcgcaggtgcgataacatcttcatttgaaaatgctactgcagatggtccaacgaatacagatgcaagatcttcaagaccagctttttcagctgcacgacgcaagattgagtttttgataactttaaactcaacttcgctttcgcgaaggttgcgacggagaactgtatcttgctcaactgtcaaaccgcgagaatctacaacgacgattgatgcagcagctttcattttttcagctactacgtcaactagttccgcttttttagcaataattgcttcactcattagtgtgttcacctccgtaattattttgcttggggaatttttccaaaagaaaaacgcgcccaaacctagacacgaaagtacaatacgcttcttttaattgatacgttttgtcctcggtaggatctttatgagtcgtgctcccctactgtcttaggcagttttttcaaaccgtaaattagtttatcacatataaaaaaagaatgcaagtacttttgcaaactttttttatattttttaatcgttgtagagactcttgatattattcaaccaagcataggcaagtcccattaggactcctcctcctacccagttggcaaagaaggtgacgctataatgacgtaaaatatttaaaaactcaaaatgcggcaattgactagaaactgaattaaagctcaataatgagaaagaagcaaagtttgcagccaagtgttcattggtcataaagacaaacatataaatagcagaaagggctaagagcaccttggctgtttcatctttgaaatatagataagaaagaatagcaatatttacaaagatattggcaataaccccttcaaagaaaaccacttgattgcttcgttggagtttattttctgctaccgtggctaggaaaccttttggatcgatatgtgcaaaggcagttgtttgattgaaaagaaaagcgacgattaaagcaccaattaaattaaaaaaggtacaataaagaagaatttccaaagctttcttccaatgaattttctttagataggttcccgccgtcaaatacatcatatttgaggtggttaattccgcatttaagaataagaggtaaaccaagccccaggcaaagatgaatggaaatagaaaacgaccagatccaggtaagaaggtattcaacaagtctgcggcaactgcaccgactgcagtacttaaagtaagaaaacctccagcaaaaatagaacgaacagcataccgagttttggacttctgataaaggtcctctttcttattacaagcagctcctactttttgaatgaaattagattcagacataaaaatctccttataaaatgtttgtgaataaaatcattatagcatagaaagaggcctttgaaaaggtttgcaatacaaattttgaaaaacaaaaaattcgatttatttcgctcgtatatcaataacatctacaaaaaaaagcagaccatgtctactttttttgtatcaattcaaacgattagcccaagcaatatccaaattaaggatttcttgagaagtaaattgttgacgataaggattgtataccgtacctgtaataccaccttgaacattaggtgaatcatattgagtcaaattataagtttcaatgatgtggtttagttttgcgtagtaacttgtatcggtagcataaacaccagtcaaagccgctgttgcatcttggtaactagatgtgttgcttttccaagcccctgcaaaatgtccttgtttcaaaacagctacatagtcttgcaatgattcataataagaaggataagaacggaatgcatcattaattgtataagcatttcctgcaccatcatcttcccacgtttgcattacggcagattgaccagcataacttcctttaataccaaagagattgtaatgtggataagaagataagcccgactgacctgatccactttcaagaatagcttgggcaatcattacagaggcataaaggtcattctcttgaccgagttgacgagcagactctccaatttgtgaaataaaagcttctgtaggatctgaatacgtttggtaagttccatcgtttgcaccaactgacgttacgtgctcactcatagcagcggcaaatgtccccactgctaataccgaaacgatcaaaccaaatattttcgtcttatttcgtattttctttttcattatacaatttatctccaattaattttttatcatcttttatctttatataaattataccatataaaacgataaaaacaaggaagattttattacacttgtattacaattgcgagataaatccaaaataaaaatgacattttcatgtcatttcaatttatttcgtaaaacgcattttctaaaatagcatcccatgacttctctagtccttcccgggttacagaagagaaaacgataaaggtgtcagctggatcaaaatctagttttttcttgatgatcgattcgtgtttattccattttccacgcggaatcttatctgctttagtagcaactaagatcacagggatctcataatattttaagaattcatacatctggacatcatctgctgaaggttcatgacgaaaatcgactaggctaacgactgcttttaagttctcacgactagtgaggtattcttcaatcatccgcccccacttctcgcgctcttttttagagacgcgtgcatagccataaccaggtacgtctaccaaacggagtttatcatcgatattgaagaaattgagcaattgggtttttcctggtttcccagatgttctggccaggttctttcggtttaagagagtattaataaaagaagacttgccgacattggatcgaccggcaagtgcaacttctggaatctcatcttgaggataatgactcttatttgcagcgcttaagaggatatccgcattatgtgtgttaatttccatattttatctttctaggctgtttcgagaattggtttttcagttccatctacagcttcttttgtgattcggacaagtttgacatcttcttgacttggaatttcaaacatgacatccatcatcgtttcttcgataatcgaacgaagtccacgagctcctgtttttctttcgatggccttattagcaatttcttgaagagcttcatcatcgaattccaattcaacgttatcataagagagcaaggtttggtattgttttaccaaggcattgcgtggctctttcaagatacggacaaggtcgtcaactgtcaattgctcaagagcagcaaagactggaagacgtccgatcaattctgggataatcccaaatttttgaatatcttccgcaacgatttcttgcatgtaagagcttgattcatcaatagctttattgttcttaccgaaaccgatgactttttcaccgagacgttgcttgacaatttcttcgatcccatcaaaagccccacctacgataaagaggatgttcttggtatccacttggatcatctcttgttgagggtgtttacgtcccccttgaggtggtacactagcgacggtgccttcgataatcttcaagagagcttgttgcaccccttcaccagaaacgtcacgtgtgatagagacattttcacttttcttagcaatcttatcaatttcatcgacgtagataatgcctcgttctgcacgctcgatgttgaaatcagctgcttgaagaagtttcaagagaatgttttcaacgtcttctcccacataaccagcttctgtcaaggctgttgcatcggcaatagcaaatgggacattcaagctacgtgctaaggtctgggccaagaaagttttacctgaaccagtcggtccaatcatgaggatgtttgatttttgtaattcaacatctgtctcatcttcgcgcgtatcgtggaagttaatgcgtttgtagtggttgtatactgctacagcaagggcacgtttggcacgatcttgaccgatcacatagtggttcaagatattgagtaattcgattggttttggaacttcactaaggtctgcaagaacttcttctgctagctcctcacgaataatttcttgtgctaactctacacattcattacagataaacgcattgttccctgcaatgattttttggacttcatcttgactctttccgcaaaatgaacaataaaccatcatatcattattttgattcgttggcatgtatttcctctttctgtcattttctatttctatttagtttaaaataaggtcatgtaaaaggcgtgaatagaattcacaagattggtaaaagcatttagtaagaataaaatagcgaggccaaaccgttttttacgaaaagtttgtaaggcacaaatcatacagatgacgcacaagacagctgtaaaaaaaccaaagacacttcgctccattaatctaaatcctttctcttgtaataggtgacagtaaaatcatatggattcttctcatcttttggatgatggacttgacgtactctttcatagcggttctcttcaaatgttggtgccaatgtatcgccatccatatctgcatgaatcatggtctggatcacctcttctagctggtcagaaaagagccttaaaatctgactgcctccaataatgtaaagattcttctcttggttctgaaaccagtccaagacttcttccttgctgtgcatgacgagtacagcgtcattttcaggatcataggctttatcttgcgttaagataatgctggtccgacctggtagaacccttttattcattccatcaaaggtcactcttcccatgagaattgcttgtcccatggtcgtttctttgaaatgctgaagctcagctggcagatgccaaggcatgacttggtcctttccaataatgccattttcagtttgagcccagataccaataatctttttcattctctcatcctttacactgatacttctattttatcaaattttcttataaaagacagatttcaactatctagtttggaggatatttttaaaatacaaacagaaaaaaccgcgaggaattcgcggtttttcttagccacaagttagcttagtcttcatttttgcgttttgcaaatccgaaaaatgagtagaaaaaacaacatttttaaatttaaatcgcaaggtcgaacttcaactgtggtttaactggatcatagtcgaccaattcaaaatcttctggtttaatgtcaaagaaattggttccatctggtacattcaaaaccaagcgaggctgacaattagtcgcctcacgacggagcaattcttctgcttgttcaaattgattatcatagatatgaaggttattaatgaagtaaaagaacttccctaccttccaaccaaagtgtttggcaatcatcatctgaagggctacatattgcatggcattaatatggtgggctaccaacatatcattagaacgctgggtcagggttgcatctagatagatctctccttctacgcgacgcacgtcaaacatggtctgaaaagcacatggcaagagtccttctgactcctcaaaagcatcataatcccagagcgagatgatgttgcggcgattccaaggattggcttctaattgtttgagaatcttattcgtaatgtcatgctttttgaccactgctccatagcgctgtccaatcgtacggctatctccaacttcccagtcattccagtaatggacattgtatttttcttccaagacatctaaactattagactgatcttggtaaatccatagcatctctttgatggctgatttaatcgcgataggacgaagggtggtgataggaaactcgccttttgcgagatcaaattccataaaggctcccgtgatgtacttggagttggcagttctgccatccttgtatttgggacgcgcttgctctgaccagaccccttcttccataattttacgaatatattctttaaatactatatctgcttttgtcatatacactccttgaatccagttttgccttcattataacacaggacaaagaaaaaaaggagatgcaagcatctgctagatctcctacttgacgtctcattgtaaaacaagggatgccgcaccaatgacaccggcatcatttcccaaggtagcaagagccaattgtgttgattcacgcacttgtgggaatgagttttcttcaaagactttgcgcactccttccaaaaggaattcacctgcagccgaaactccaccaccgataacgatcttagatgggttcaaggttgaaccgatgttggcagcagcaagcccaaggtaacgtgagaagttcttataaacgatcaaagcaagagcatcaccctcttttgctagatcaaagacagttttagcggtcacttcttcaccattgtcgatcaagactttcaattgagaatctccctcgtactcatccgcataacgacgagtcaagttgacgatacctgttgcagatgcaaccgtttcgagacatccttttttaccacaggtacattgaatcggatcatcaaaatcaacagtgatatgaccaagctcaccagcagctccacgcacaccatgtaagaggcgaccttcagcgacgattcccccgccgacacctgttccaagagtcatgaaaacaacatctggttggttttcaccagctcctttccaacgttcacccaaagcagcaacgttggcatcattatcgataaagaatggaatatgaagggcactttcgatcttttctttgactggttgaagggtcttccagttcaagttgtaggcaccgataactgtacctttttcacggtcaacgacaccaggtgatcccattccaattccttgaaactcagaagcatcgagttcaagcaatttcaaacgatgcgcgattgattcgatcatatcatctacgatatggctaccttcatccaagatatttgttttaatagaccatttttcttgaacttccccatccaaggtaaggatggcaaatttgatcgaagttcctccaaggtcaatcccaataatttttttagacatctattactcctttcaacctgtaaacacttacagttctattatatcagactttttgtcaaacgcaaaggtttgcacgtaacttttctcaactttttaacaagaaactgaaggattgaagacctaggacaaggaaaatcaatccaataatattaagtagaaaaacactgatggacaacggactgacaattaaaaataggccagtaaaaagttggatcaaagcaaagaaaatatatcgcttggatagttcttcaacctttctcgagtagaaattggcttttcggaagtttaaaatcgaacgatagatcagccaaatccctaaagtgactggaaagacaattggcaaggtcttgtagccatagagcagtaagtagactgcaaaaactaaggcgaccatgctgtgaaagagctgttgctgctgaatgataccagcttggcgcaatcggtaatagcgtgaaaaacgcgaaagggagattaaaaagaaaccacaggaaatcaaccagctaaatgagccaatgtgctcaatcggattgataaacaagacgataccgataatagtaaaaatagtggctgaaatcccaagggatatccggttcaattgattcatagggtctccttattcatctaattcgctcagatattcatagcggtcatacttctcaagcagtcgctcattttcctgatccagttctttttgaagggctgacaatttaccaaagtcagagccgttttcattcatctccacttcaatctctgcgatccgattttcaatggcttcgatatctgcttcaatgcttgcccactcctgcttctccatgtaactcatgcgcttcttctcttctttgagcttaactggtttctctttttcaaccttatgacttgccgttgtttgagctgtttcaaaggctttttcatccaggtaatccgtataattgccaaagaactcacgaatgcccccattttcaaaagccaggatcttgctcgccaccttgtccaagaaatagcggtcgtgactaacggtaataacgggacctccaaagttttgaaggaagttttccaaaatcgtcaaggttgcgatatccaaatcattggttggctcatcgaggagaagcacattgggtttttcaatcaagagttttaaaagaaagaggcgcttcttctcaccaccggagagtttttcgatcaaggttccgtgcatagagcgtgggaagagaaattgctccaagagatcagcaatcgaagtcgtcccaacggtcgtcttcacttcctcagcaacttcctggaggaaattaatcacgcgcttgctttcatccaacccatcaatctgttgagagaaataagccacccgcacggtttccccgataatgacttgcccagactgaggctgcagtcgctcagcgatcagattaagtagggtagacttgccgacaccattatcccctacgatcccgatgcggtccttgttttgcaccaagaggttaaagttctgtaaaatcggcttattttcaaaagcaaaactcacatctttaaactcgatgactttctttccgattcggctggtctcaaagttcatctccaaatccgtctggttgctttgaccagacaaatcttgcttgagatcatgaaatcgattgatccgcgcctgttgcttggtcgcacgcgcctgaggttgacgccgcatccaagtcaactcctgcttatagagttgctgcttcttatgaagaagggccgcatcacgctcgtcttgctcagcctttaagcggacataatcctggtagttgccctgatactcgatcaagtttgcccgatccagctcaaagatccgtgtcgagatattatccaagaaatagcgatcgtgggtaatgaagagcacggttttcttagaattcttcaaaaaattggtcaaccactcgatagtatcaatgtccaggtggttggtcggctcatctagtaagagcaggtcgtggtgagacagcaaaacttgggccaattgcacccgacgacgcaagcccccagatagatcgccaactttggcattcaagtcttcaatcccaagttttgaaaggactgtcttgacctgactctcgatttcccaagcattgagcgaatccatctctgccatgactttttcaagacgagcttggttctcttctcggtaatccgtcatcaagaattcataatcgcgaatcagctgcatctcccgcaaatcgctagatagcaccgtatccaaaaccgttttttgatcatcaaagtctggctcctgcgtcaagtagccaatcgtataatcactcttggcagaaaaaggactcacatctccatcaaagccagagcgacctgacaacacatctaacagcgtggtttttccagttccattgaccccgatcaatccgatccgatccaagtcgtgaatgataaaggaaatctcacgaaagacagtcttatctccgacagatttggttaatttatcgacaataaaatcgctcatttttcctcctcttttgcatgctggatataggcgatgatggcctctttttcattggccagttccccatcgacaatggcatattcaatttttgtcaaaatctctcctaaggctggaccaggttgaaagccgtagtctttgatcagcatacccccattaaccatcacttcatgcttatcatgaatggtcaagctatcataaacgcgctcgatggccaaataatccacactcaaggcatacccttcacggagctcttcagctagtagcaacaaacgcttctcatacttgtagcaagcacgcttgtctagacttcctttttctcggagctttagaatctccacgatctgctccaccgtcttggcaaagtctctagaggtcttccactttttaaagaattttgggatatcttgaatccctagtgctaagaccaaagcagcccaggcttgctcagaagttgaaaaggtatattccaactctatgtcaaacaaacgctcgatcgcttctttgcgatccttcatctctggcagatagtgataggctccacttgctagcatagcctccaagccttgtctccagtatggagaaagcaagagtttatcaaactcgatgaaggtacgctctactgaaatcttctcaagcaagggagcacactccttcatggcatcaaaggttgcctcttctaattcaaagccgagactggcttgaaaacgaaagcctcgcatgatccggagcgcatcttcgttaaaccgttcgtgaggaagcccaacggcccgaaggaccttgttttccaaatcttctagtccatgaaagaggtcaacaatttctcctttttcatttaaggcaaaggcattaaccgtaaaatcacgacgcttgaggtcttcttctaacgagcgtacaaaagacacggagcttggacggcgataatctacatagacatcctctgtccggaaggtcgtaatttcatattcttgaccattttcaaggaccaagacagtcccgtgttcgataccgacatctactgtgcgatcaaaaatcgccttggtctcttctgggtaagaggaggacgcgatatcgacatcgtgaatggggcgatccaagagggcatctcggacagatcccccaacaaaataggcctcaaaaccagctgctttaatcttctctaatattggtaaagcctcctgaaactcagaaggcatcttttctaatctcatagtaagtgttccaaaccatagacaagctcatgacgcttgacaacttctttaatccctagatttactcctgtcatgaaggaaacacgatcataggaatcatgtcggagagtcaacccttcgccttggctaccaaaaatcacctcttggtgagcgactaggccaggcaatcgaaccgaatggatgcgcatcccttcaaactctgcccctcttgctccaggcatcaactcttcttcatctgctgcaccttgctggatcttctcgcgcttctcagagatcaactcagcggtcttaattgctgttccactcggtgcatcttttttcttatcgtggtgcaattcgataatttccacatttgggaaatacttggctgcttgcgctgcaaattgcatcaagagcacggctccaatggcaaagttcggtgcgatcaagccacccaagcccttttcacgtgaaaggtctgtcaattcttggatctgctcgggagtgaatccagtcgttcctacaacaggcgcaaagccattctcaattgcaaagcgagtattttcgtaagcgaccttgggcatggtaaagtcgacccaaacatctgcctctagacccacaacatcttctttgcgattaaagacagggactcctgcaacttctgtctcatcagtaaatggatcgatcaagccagttaattctagctcaggatcttctgaaaccatcttgtaggctgcttgtcccattcttcccttgaaacctgcgataatgactttaattgacatagaatactccttaaacgatagggatatacccaactgctaagctatggtcacccaagtgcgtcccaatcacccctccaaaggtagcaaaaggaatctctccttccactccttcttcgatgagcagttggcgaagtgcttctgctttttcagggacattggcatggatgacaaagacttggtaatgaccatctgcgatatctgatacaacaatctctaccaagcgtttcatggctttcttttccgtccggactttctcaaagacctcaatcacgccttcatcattaaaatgaagaataggcttgatactcaagaggttcccaagaatggcagccccatttgacagacgaccacccttaaccaagtggttcaaatcatccaccatgatataggcagaggtaccatcaatctggtgttggacattggcaacaatctcatcgaagaaacggccttcaccagcccatttcaagcagtcttctgccatcattcctagaggagcactggtgatttttgaatccggaaattcgacggtcaagccttcaaattcgtccttcaaatattggatattttggtagaaaccagaaataccagatgacaagaaaagaccgatagcatgcgtatagcccttagctgtcaaaccagataagacttcttctaactctgcaacactcggctggctagtctttggcaattccttagacgccaccatcttttggtagaactcatcgtgtgtcaggttcttcccttcaacataagactccccatcgatatagatcgggatctctaaaataaataagtcgtcgtgatggagcacgtcttgcgttaaataggcagacgaatccgtgatcactgctaatttcattgattaaaactccaaattaatacccggtaaatcgagggcaatttctgtgacttcataagtcaaacggttgagcatattcaagcaagggcgagccaattcttccacttcgtctttgctgaattcacttggttcattgacataacgaccaaacaagtggttgatttgagtgatggttccgctgatcacaaaaccgtcaaaaacgatcatgtagctcaagatgacaatcaaagaagtcgtgttttgttcttgatcacgattgatcaattgaaagtttacatctacttttgtttcagggatgccattttctttttcccactcaaaattacgagcatcatagtggtattggctaacaaattctttttcacgttgaatatccatttttattctcctaaaaatatgcgataggcttattatatcataattcagctcaagataccaacgtagaatgaggtgattttttcgctagtacaagaagaaaaggccgggaaagacccaaccttttagtcatgtttagtttttaggtttgcgaagcaatccgaacaagataccacttacgactgcaccgatcaatacgaacaagatgtaaagaagtggatttgatgtaagggcgataacaaagattcctccgtgaggagccatgagtttcaagcctgcaagaccaacaagggcacctgtcaatgctgaaccagcgatgaagctagggatggcacgagctgggtcagctgcaccgaatggaatggcaccttctgtgatgaaggaaagacccataacgatgtttgtcaaaccagaatctcgttcttcctgtgtgaatttatctttaaacaatacagttgctacgaatactgccaatggaggaaccataccagctgccataacagctgccataacaatagaaccacctgaagcaacagattcagcaagtgtacctgtagcgaagacataagcggctttgttaactggtccacccatatcgacagccatcataccgccgacgagaagtccaagaaggacagctgagctacctgacaagcttgaaaggaagttgttaagaccagtattgatagcagccattggaatattgatgaggaacatcaagaatcctgtcaaaccaacaccaagcaatggcaagagaaggattgaacggataccatcaagagaacgtggaagacctgcaagggctttacgaagaactagaatcactccacctgctaggaaaccaccaactaaggcaccaaggaaaccagatgatactgctgctggtaattcacctttagcagcaccgtaggcgatatttccaaatgctgaccctgagctagcaatagatccagcgataaaccctgccacaaaaccaggtttttcagcgattgagaatccaatgtaacctgcaagtacaggaagcatgaagccaaaggctactccaccaattgttttaaattgtgctgctaatacatgataagaaccaagactagacaattgatcttgaggtacaccaagaacttggtcaatcaagaaggcaagggcgatcaagataccaccaccgataacgaatggaagcatttgagaaaccccactcatcaagtgtttgtagaaggctccacccaagctcaatttttcttggctagcgctagcttgtgcagcattttcagcgtggaagacatctgctttgccatccaagatggtttggatcaagtcttctgtctgacggataccggctgcgactggtttagagatcaattttttgccatcgaaacgagcagtttcaactgctttatctgctgcaatgatgaccccttcagctttggcgatttcttcagctgtcaagcggttgccgacaccagatgccccgttggtttcaacgcggaccgtaacacccatttcttcaccttttttgatgagggcttcttctgccatgtaagtgtgggcgatacctgttgtacatgctgtaacggcaacgatgagaggtttgtcagacgaagctgcttctttgactgcttctgcttttttcgcttcttcagctgcagcttcttgctcttctgcatcaaaggctgcgatcacttgatcaggagtgcttgcttggcgaagtttgtccgcaaatcctggtttcatcaagtacttagacaattcagcaagggcggccaagtgagtgtcatttgccccttctggagctgcgatcatgaaaaacaagtctgttggttggccatcaagcgaagcatagtccacacccttgtttgattttgcaaacaagaccgttgcttctttgactgcttcatttttgctgtggggcatagcaattccgtcacccaaaccagttgaagtttgtgcttcacggttcatgattccagccttgaaggtgtcaaaatctgtcaccacaccattatcaacgagcgattgaatcatctcattgatcacgccctctttatctgtcgcttgaaggtcaaacaacatcacgtttttatttaaaacgtcttgaattttcatagtttttctacctctactttttcataagtttcttttatataatcagctgttgccaaatcatctgagaaagtggtcgctgttccacaagccactccccatttgaaggcttcgatgacatctcccgtcgttgcgagcttcccagtgaagcctgctaccatggaatctccagccccaacagaattcttcacttcccctttgattggttttgcgaagtaagtaccgtttggactgacaagaagagctccatcacccgccatggaaataatgacgttttgtgctcctttggccaagatttctttggcgtaacgttcaatttctggtaattccgtcaaggtaactccaaaaatatctcccaattcatggttatttggtttaaccaattggggattgaactctaaggaatcaatcaaggtttgcccttcaaagtcgcaaacgacttgcgcgcctgtcgcacgagttgctgcgatcaattgtttgtaaacagcatttccaagtgaagatggagcagatcctgcaaagactaccacatcatctgatgataaactcgataagatgtcgagcaattcttgcaactgagcttctgttacttctgggccattcccattgatctctgtttcctcatcagctttgatcttgacattgatccgtgtatcttggtccactgtcacaaagttggttgaaatggcttcgctggtcagtacgtcttcaatgaaacgtccagtgaaaccaccgataaatccagtcgctgtgttctcgatatcgagacgcttcaacacacgactgacattgatccctttaccaccagcgaatttatcttccgaagccatccgattgaccgctcccgtctctacatgatcgagtcgaacaatatagtcaatggctggattcagtgttactgtataaatcaaacctctataacctccgttttttcttttaaaacctttaatcgttgcggttcacattgattggtgataatcatggctcgcttgataggagccactttgacaaaggatgtcacgccaattttcgaatcatccgctaggatataggttttttttgcattttcgataatcgcacgcttgacagatccttcttccaggtctggagtgctgtaaaactcatcatcgattccattcattccaagaaaggccttgtcaaaatttaactgaccgatttgattgagcgcgattcctccgatactagcatctgtagaagatttaaccattccacctataataactgttggaacatttcgctcaaccaacttggttgcatggtgaatcgagttggtcactactgtcaccgttggatttacaatttcttgtactagaagttcattggtcgtcccggcatcgataaagaccacatcgtgatctttgatcaattccgctgcctttaccgcaatttttgacttaaattgaatgtttttgatagatttttctttattactttcttcctcttggagaaagtgaagactttccgccccaccgtggacccggcgaagtttgctttcatcctctaactcatccaaatcccgacgaacagtcgattcagatgttcccaaatcttgtacaagagtctccaaagagacaaatttttcctttaaaaccttttcgaggataaactgttttcgttcagatttaagcatttcccctccttttgcaatcgattacaaaaactattatactctatctttcaaaattgtcaacattttttatcattttctgtcattttctttcaaaagatacaaaagtgtacaaaaaagagtgggaatgaactcattttgttaaaagagttcttttcccaccctcataaggtttcttcagttttctttgaagattttaagcaataaagtttcaaagcatccactctatctcaacttggcttaatcatttcttgaagattgtttctttttcttgaaaccaaacaatccagcaagtagcccaacgacaacacctgttgttgctgctacatttttggaggaatctctccctgccacagcttggctgttttcttttttcggtttgatttcttctactttcgcttcttgttttgaagctggagtagcttttggtgcttgcacttgcggactattggtacttgttggaagaactgtcggcgtatccgagaaagttgttggattgcttgaacgaatatccattggcatatctgctgcttttaagatagctggatccatacgtgaggcaagatcttcatattgagaattcaacagttccacgacactttgataggattgtaatgttgtaaattcttcttctaatttttcttttttattttctaaattagcgaccgcagctgctaaaacagattgggctttgaccaataattctggagcatttttaaagtcagaaagacgtttttctgcagcagttagacgctcttgcgctacttttaaagcttcatgtgcttcttgaacaacctgcgctttttctgcttcttccgctcttaagagaactaatttctcatgtgcagctgctaacaagtcttttgctttttgaagcgatacttctttcggctgaattgccgcttcaatccttccacgcgataccgcaagagtagccttagccttttcaaccgcatggtcctttcgaacaagaaggattttgtagttttggatggtcttttgcacattggctatctctatttcgacattcgagttggaatggcgagcatctgctaacttgccttgcaagatgatcatttgggactcttgattagccttgtctaacttaagattggccacttcatcagacttggcttttacatctgctcttgtcgtagtagcccctgctccctgacgcaattgttgagccaattcgctggtagtcacagccgaggtgaccggactgtgcaggaaggctgcttcagacatcgcattagttgggtcataagcaacagatagagcagtggctttgttatccagcatttgcaggtaatgaccaactttggcaaaggcttctgctccaatcttcatatagatatcgttggcatcaatctgtgtttcatctgttgatagaccatattgagcagccattttttggtaggttgctttttcattgaaccaaaagtccaccgcgccagcaggagagaatccatatgcaacattctcgtttggcaaatacttaaacatatgccaattagcttttttgaaatattctaactgtacttggctagcaggaaaagaataaggatcaagtttcaattctggcaaccctgcattccgacgataagcattgatagcatccgcaatttcaagagcccgtagattagcttgcaaggttgcagactctccaactgtcaagccgtcttcttcacgactacgcttgtataaggctaaggcactcgctgcagcttcattgccattgttagctaagtgttgcaaatagccttcataagttgcttgactcaactgagccgggctactagcagccgcttgttctaaggcagctagctcggcttctttagttgcaatgacagctttcaaatcagtgagacgtgtttgggctaattgaatgtcgctctcaatttgagccactgtatctgaaccattttgctggctagcttgcaaggttgcaaggtaattttgagattctcggatactttgctcgacttgactttgctccaacaaggcctgatttagcacattctcatcattcgatattggtgcttttgcctgatttaattcattttgagctacatcgaccaaagattgctgagctgtgacctgattttcctgctgacgaacagcctctacaatttgatcatgtgcatcttccgcttctctaaccttattttcttcgatggtgacataggcttgagctacttttacatcattttctgctttctcaattttcgcatccgaagttgtcgcaatgaggtcttcggcatccgtaactgcaagtttcttctcttctaattcctgtccagctactttgactgctgtatgagcctccattactttttgctcttggtaatgtacatcttttaccgcttgtcctttttgagccgtaatttgtttcaattcatcaactgtaattggtttttcgactacttccgtgctgttggtttctgcattttcattttgcttgacttcttccgcactagccttgtgctgaaacataccagacagtaccgttgttgcagcaattcccgtcgtaaaaactgattttcctaatttctttcccatttaatcacctccaaaactaaatcttttcaaaaagtttttctatcttttaggataccacattttgttaccaataactagtagtaggaaaaagttttttttatcattttagtgtaaaagaaaaacagctaacgctgttgcagaatggtaacaaaccctaccagcaatggaaaatttgtttgggtaccttatagttaaaccacttaggaaatctgatgtagtgccattcttaagagtttttaactttccccagtaaaagaaaaagattaaagaaaattactttttcttcaatctaaaaatgccgacactattagtcttcctgtttaatttgctccaacattttctcttcttctgctgtcaactcatagttttctagcaagtctggccgacgctccaaggtctttttcaaactctgatagaggcgccactgacgaatattttcatggtgaccgctcatgagaacatctggaaccgtcatccctctgtaatcataaggtcgtgtgtattgaggatattctagaagaccagaggagaaactgtcatcctggtgactggactcttttccgatcacttctggaatcaaacgaactgtcgcatcaatcatggtcatggccgctaactcgccacctgtcaaaacataatctccaagagaaatttcatccgtcaccaaggttttgatcctctcgtcgtatccctcgtagtgaccacagataaagatcaattcttcttcctgagccaactcttctgcgtaggcttgatcaaaggtccgaccagcaggatccagtaaaatcacgcgcggattctttttctcaatcgcatcaaaggtatcaaaaatcggttgagctcgtaagagcatgccttgcccgccaccatagggttcatcgtccacatggcgcgctttctccgcgttttcacggaaattatggtagttgatctcgagaagtcccttttcacgcgcctttccgacgatggaatactcaagaggagaaaacatctctggaaagagggttaaaatatcaatcttcatcgtctaacccttctaagatatctacatcaacccggtttcctgggatatcgatatttaagactacaggtgggatatatggcaaaagaagatcgcgttttcctttgcgtttaacgacccagacatcattggcacctggttgcaggatttccttgatctgaccgattagctggtcgttttcgtaaacatcaaggccgatgatctcatggtaataaaattcgccctcatccaaatccgtcaagtcttcttctgcaaccttgaggctaaaacccttgaacttttcgatggcattgatatggtacatatccttaaacttgatgatatcaaagttcttgtgcttacggtgactggcaatggtcactgtttggacaaactgatccttctcatcgaagagagccaactccgctccttttttaaagcgctcttccgcaaagtctgtcacagacaagacccgcatctccccttgtaagccttgggtattgacaattttcccaacgttaaaataattcattttattctttacattcctcttttaattaatttatctctacagttctctaataagagctgcaattttttccgattctgaccactgtagatagtggtggtttccacctagaatgagttttgtatttgaattccaatattctgaatctctgtactctttttctctatacgcctgacaaaatacgaaaacaggaatattatctgctaaggacaaactatcaaaatcttcagcggtaatatttacagatatctgaaacccaggagcttgcttttccaattctaagcccttttcttccatcaattcccaaatcagtctttcagtttcagcttcaaatgttacttgagttagccccttaaaataattttccggaccacattcttcaatcatcctcatttgctcttccatttctggataaggattttttgaaaaatcagcaaacattatattttttgttgttggttcaattgctatcaaagcttgacacttaattggtttactcagtaactttaaagccaaaacaccacttaaactatgaacacaaagtatataatcggaaatttccaaccctttcaggatttcgaataccgcttcaacaagattatccaaatgaattcctgactgactatgaatcggactcctacctgtattcggaaaatcaatcgttaagtaacctattgaggaaggaagtttttcaagtattggtagaaaattttcataacttggtatcaaaccagcaccatttaagcaaactagtactttatttctctttttataagtaacagagagacaaccaatctttgtagttacttcaaatcggttcataccaaaacacccctttctaaacaacaattcacttaacattcttaggttttattttatcacgttcaatagattttctcaaatgggaggaagaggatatcaactctcgtagcccttcagaaagccttctaaatctcgttcatgttggtacttaatggctgcaattttgtctttctcaaagatagtcttggtaaggtcaatatgattaatagctgcgattgcgacggtgtagtgaatgatatcagccagttctttggcaagttcctcattcgagtcttgaaccccctcttttcgaccagagcgcccattcaaaacttcggctacttctccgacttcctccactagcttgataaaaagtccttcttctgttctagattgttggtaatgatcaagtaagtatttctctagttgtctaactgttaaatctctcattccttctccttgcaaaaaaagcgagaccttgtcccgcttttcttatttttcgtcaataacgattcttacttttttatcttcagttgggacagagtagacaatcgttcttatcgcagaaatggtgcgaccttttcgaccgattacacgaccaacatcgctaggatcaaggtcaaggtggtactccaagaattcaggagtatcttcgatcttgatggttaaagcatccggttgtgaaatcaagggtttcacaattgcaataatgagattttcaatcgtatccatacatcaacctacttaaaaaattattttgagaatttagaatcgtggaatttcttcaagacaccagcttttgaaaggatgttgcgaactgtatctgaaggttgagctccatcagccaaccatgcaagaacgcgatcttctttcaaagttacttggttttcttcaacaagtggattgtaagttccaactgtttcgatgaaacgtccatcacgtggtgaacgtgaatctgctacgttgatacggtagtaaggttttttcttagaacccatacgagtcaaacgaattttaactgccatttttataagtctcttttctatattttaattttcggtgaaatagacaagctatttagcacatgatctattataacacattttatagacctgtcaagaaaaaaacttgacagtatttaaatttttttattttatcagtaaatcggcgatttcttgatagttgctaacggtataagtcggcactacttggctggtatttttcttgtgatcaggattataccagacggtatcaatccccgcagcatttcctcctgctatatccgccgtcaaagaatctccgatcatgagggtctttttcttgctaaaacctggaatcagttggccaactttgtcaaaaaatgcaggttctggtttctgagtatgaagttgctcagagataaagacctctttaaaataagaagcaattgttgaatgagccaagcgtccttcttgaatggcagtcactccgttcgttgcaccatagagctggtaacctgctttttcaagtcgggccagtaagtcctccgcacctaggaaagattgcccctgaagactgatgtaatcttggtagcgaagagccatctcagccccatcaacagaaatcccaaagtgggcaaacccgatcgcaaaccgactatccactagctcttgcttggttaacttcttttgttccaaatccttccagagcccttggttcatgggtttgtaataatccttaaaggcctgtacatctggaaaattcatgtcttctaacatctgcgtcaaggctgtttcttcagcagattcaaagtccaacaaagtatggtccaaatcaaaaagtaaaaatgtatatgccattacaaacgatccttcaatttttctacaaataaataagccgcagggcaggtgagggtattcttgatggtcagatggttgatctgataaatcttcttgcgatcggtgtgagggaattcccgacaagcttttggacgaacatcatagatggaacagagattgtctccaccaagaaaggggcaaggcatggatttaaaaaccttgtccccatcttcgtcaacttgaagaaattctgcctcaaaggcaggaagcttcatcttgaaatatttggcgattcgcgtgatatcggcttccttaaaatcaggccctaaggtcttgcagcaatttgcacaagcggtacaatcgatttcttggaaaacttcatcatggatttcttgcgctattttatctaaattcttaggtggcttcttcttgagattcgtcaataccttgcggtgctccttttgcttttgtagagctaactgatggtatttttcaatatcaatttcctgtgtcatcctctatttcctcttctaaacaatagaaagattataccacaaagactctaaaaaaagatagatcctgagatctatctcacttgattaatccgttacagcacctgttccgtctaggctccaagtgtcttcgatgtatgggataaaagttttcaaggtttctgcatccccttcaaaagaaatggtataaactttttcacccttctggaagatccaagtaatcaggtattgaccggatttcatgacaatttgaagctggtaagcgtccagacctgcgactttagtccgcgctcccgtcatctttccaacatcctggttatcttgccacataacagccagtttcttggctaaaaattctgcattaaattcaatatcagctgggacttttgccttctctcgcgtaaagctgtccaaggtgacaatattatagccactaccatccgtatactggacagcttctgttccatcgatatccgtgaacttgatccatttacttggaatatcgatgtatccataatctgcatttccaatccgcttggttacttgactggatgtgtttttctttgtagaagaagtatcctttgacaatgagctgcttgttttcttttcgactttactgctactttcttttgtagaagaagctgctgtgtcctttttagtggtgtgactgcaagccattaatgtgcaggcagaaagaatcatcagtgatgtgaccaataatttgtgtttcatactcaacctccttgagaacggtttctttcttctagtctaccatgaatgtgggtattttaaaataggataagtgtcacatctgatggaacctttctaattcagtttatttctttcaaacctaaaataaaagcgcccttttttggggggcactttaaatgttattcttcatccattgacaagacagataagaaagcttcctgtggtacttctacagatccgatcgctttcatccgttttttaccggctttttgtttttcaagaagcttgcgtttccgtgagacgtccccaccataacacttggccaagacgttcttacgaagggccttgatatctgtacgggccacgatcttatgaccgatggctgcttggataggcacttcaaactgttgacgagggataatcttcttcagtttctcaacgatcaacttcccacgttcataggcaaagtccttgtgaacgataaagctgagggcgtcgacagtatcgccattgagaaggatatccattttgaccaatttagaaggacggtattcagacaactcatagtcaaagctcgcatagccacgagtagaggatttcaatttatcaaagaaatcaaagacaatttccgccagtggaatttgatagatgacattcacccgattttcatcgatgtaatccatggtcacaaagtccccacgtttccgttgagccaattccatcacagcccctacaaactcttgtggcaccatgatttgggctttgacatacggttcttcaattgaagcgatcttggttggatctggaaactcagaagggtttgagacatccagtgcttctccatctgtcaaattaaccttgtagataacagacggtgctgtcatgatcaagtcaatattgaactcacgctccaagcgctcttggatgacgtccatatgaaggagccccaaaaaaccacaacggaaaccaaaaccaagggcctgagaagtttccggttcaaattgaagactggcgtcattcaattgcaatttttccaaagcttcacgaagatcattatatttgttagattcgattgggtaaagaccggcaaagaccattggattcatttgcttgtaaccatgaaggggctcacttgctggattggtcgctagggtcaccgtatccccgacacgagtatccgcaacagtcttgatagaggccgcaatatagccaacgtctccagtcgcaaggaaatcgcgtccaactgctttaggagtaaaaatcccaacctcggtaacatcaaaggtcttaccattactcatgagttggatcttatcgcctggtttgaccattccattgaccactcggacctgaaggattaccccacgataggcatcataaacggagtcaaagatcaaagcttgaagaggggcctcgacatcaccggtcggtgctggaactttctcaacgatctgctccaaaatctcttcaatcccaataccagccttggcagaagctaagactgcctcgctagcatctagaccgatgacatcttctacttctgtgcgtacgcgttctggatctgcagctggcaagtcaatcttattaatgactggaaggatttccaaatcattgtccagcgctaagtagacattggctagagtctgggcttcaatcccttgagcggcatccaccacaagaatagctccctcacaggctgcaagcgaccgcgaaacctcataggtaaagtccacgtgtcctggtgtgtcaatcaagtggaagatataagtttccccatctttagccgtgtagttcaattcgatggcattgagcttaatggtaatcccacgttcccgctccaggtccatactatctaaaagttgggcttgcatctcccgactagacacggtttcggttttttctaaaattcgatcggccaaggttgactttccatggtcaatatgggcgatgatcgagaagttccgaatcttctcttgtcgtttttttaattcttcaaaatttggcataatcatcttcctagtaaatttaatcgtactcttcattataacaaaaaagataggcctttgcctatcttaattcattattttcaaaaatcgcttctgcgttttatttccctcatatccaatccgttcgtaaaagagatgtgcttcttttcgatgagaggcagaatttaaacggataaaggcatagttatgagtttgagcaagatcttctactcgctccatcaattggcgaccgatcccacgtccttgagcagatggaaaaaccgctagacccaaaatattcagaccggcgtcactatagaggctttcataaacttctgcctccacataaccaagaatatttcctgtttggtcctcttcataaacaaagcaaaaatgatccgaatctggcgaattaaatttatcgatctgagctgccactttctcaagagtcgaatcataacccaatgcttggtgacacaggtctcgaatttgaggagcatctttgacttgaacagtacgaatcatacctctacctccatgaactcattggttttattttagacctttttcctcaaaaagtaaaggaaaacctgatgaaattcaaaaagaaaatccgatttagatcaaaatcatcttttttcgcatttctcagggatttctatttactttttcgatttaattcattataatagtaagggtaaatacaaggaggtgagtaggttggccagaggtcgtggaaaagcaagtcctcaagacaaagaggcattacggattatatcggaaaaaattagagaattactgaaagaacaaggaaaaaagcagatcgaattatctcgtattactggaatccctgcaagtaccctgactggatatgtaaaaggaacttctcttcccgttcctgaaaatttagagaagattgcaggctttttccaagtagcagttgctgaaattgaccctcgattgcgcaatgattttgtggtcattgattcagagattgaacgagtatataaacagctcgatgaaggaaatcaagaaaatcttctttcttacggaaagagtctcttgacccatcaaaaagaaaggcagaaaattgaaaagcaataccactcgtattctgtctatgattcttttgcagcttaccaaaatcagaaacaagcagatatcgtctggtttgatcaaaagattccttacgatttggctttttggattcatacggattccctcgagcctaaatacgtaaaaggggccgttgtgttaatcaagcaaacctattatgatcaggcaggggctatttatgccattgattttgatgggcaaacgttgatcaaacgagtatttcgtgaggccaacggtattcgactggtttccctcaataagaaatatagtgatcaaatcattccactagatgaggaacctggggtgattggaaaagtgattgatggctttgttcctcttgatttggaggaaatcaaatgattaaattaattgcgattgacttagatggcaccctcttacacgaggataagactttatccaaaggaaatattgaagcccttcaccgggcccatgaagccggctatgacattgtgatctgtacggggcgtcccttagcgggtgtccgtcctatctttgaagagattggacttcctgatggcaactactatatgattatcaataacgggtgtacaaccttgtctactcagaattgggaaatcattggcaaggaagagttgagcctcgaggatatgcaccggttgcaagttttaacggaagatacagacgtccagctaaccttatttgatatggatcactacctagtggtcgcacctgaagctagtgaacttgtcacgatggatgcgggtattgttaactataaaccgacacctatttcattagaagatctaccaagctacctccctatttttcaagccatgtacgtaggagatccttctgctattgatgccttccaagctcagtacgagactgcattagaagccgattttaacaccgtacgttcacaggatatcttgtttgaaattctgccaaaaggcgcgagcaaggcttctgctcttcaggcattaagtcaaacattaggctacagcagagagcaggttatggctcttggagatgccaataatgaccttgaaatgctacgttttgctggttacagcgttgctatgggaaatggcaatgttgctgtcaaggaaatcgcagacttcatcaccctgaccaatgatgaagatggcgtggcacatgctattcacaaattaattgaaactgaaaaaggagaatgatcatgaaatacgcaaatttgttggaccgttttattacctatgtaaaggttaacacacgttcagacgaaaattctacaaccactccaagtacccaatcacaagttgattttgcaacaaacgtcttgattcctgagatgaaacgcgtgggtcttcaaaacgtctactatttaccaaacggctatgctattggaacacttccagctaatgatccaagctttacacgcaagattggatttatctctcacatggataccgctgacttcaatgccgaaaatgtcaatccacaaatcgttgagaattatgatgggggtgtcattgcccttggtgagtctggtttcacactcgatccagccgattttgctcatttgaacaactacaagggacaaaccttgatcacaactgacggtactactcttctgggtgcagacgataagtcaggtatcgctgaaatcatgacagctattgaatacctgacagctcatcctgaaatcaaacacggagaaatccgtgttggctttggtccagatgaagaaatcggagtcggcgcagatcaatttgatgcagaggatttcgatgtagattttgcctatactgtcgatggtggtcctcttggagagcttcaatacgaaaccttctcagcagctggagctgaaattaccttcaaaggacgcaatgtccacccaggtacagccaaaggtcaaatgatcaacgctcttcaattggccattgatttccataacaaactccctgaaggagcacgtccagaattaaccgaaggttatgaaggcttctaccacttgatgaacatcgatggaactgtcgaggaagcaagtgccagctacatcattcgggactttgaaactgaaagttttgaaaaacgcaaagacctcatgaaatctattgccgatcagatgaatgcggagctcggcagcgaacgcgttctcctcaccctcaaagaccagtactataacatgaagcaagtgattgaaaaagatatgacaccaattacccttgctaaggaagtcatggaagatcttggaatcactccaatcattgaaccaatccgcggtggtacagatggatctaaaatttcctttatggggattccaacaccaaatatctttgccggtggcgaaaacatgcatggtcgctttgaatacgttagcctccaaaccatggaacgcgcagttgataccattatcggtattgtgaccaaaaaataagaaacaaaaactctaagcaggcagagcctgctaactcatgacagaaaagaaagttcggcttataatgaaggtgaacaatacaaatccgtggtctttaatagggctttgcctagcctgtaacaaaaactggatgaacaagagtcatgagataactcgaatatgccttgagcacgaaaataaaattattaatagcctcttgttctattgttcaatagttaacaggaggtttttgtaatggaagttatgattgaaacttcttgtggaattgatgtccaccaaaagtctatcgtttgttgtattctagatggtccactagaaagcaataaacctaaaaaaattcagaaaaaatttggtacaacaactatagctctccaaaacgccttagattggttattggaaaatcacgtcacacatgtcttttttgaaagcactggccaatattgggtgccgctctttaatattttttcagactcagaactcaatttaatattagctaaccctcaacatatcaagaatgtacctggtcgaaaaacagacatgaaagatgcagaatggattgctcaactcggacgttgtggacttattgagccatcttacattcctaaccctgaagtgatgcagttacgtttactcactcgtaggctacgttcttataagcaacgtcaaacccaaataaagaatgagattcataacctcttacaacgtgctaatatcaaactaaccagctatctttctgatatcttctctaagacaggacagtctcttttaacgctctttatcaatggggaactcattgattatgacaatgtgacagcttgtattcacaagcatgtcaaagcaagtccagaagaattaatggaggccatgaatgggaagttgtcactggaagatcgatttctcttggctcaaagcctagaagaatatcaattgtatcaaaaactcatgaataaattaacgagtgaaatgatagcttatatcgaaaaggagttcccctgaagaaaatagattacttcaaacgatccctggtgtgagtgagacctgtgcagccactattttagctgagattggaccagatgtgaaggcttttcaatcggacgcacacctagcttcttgggctgggctctgccctggttcatacgaaagtgctggcattaaaaaatcctcgcacatcacacaaggaaatcgttacatcaaacaggcactgacaatgtctggattgattgcggctcactctaaagacagcgtgttttcatctttttatagcaaaatttcccaaagaggaagtaagatgaaagccgtcattgcttgcgcacataagttgcttcgtatcatttacaaaattcttgcaacacaccaagaatacgacaaagaaaaagtgctaggactgaggcaacagttctaacaccaaaaatttaaaaaatctcaattacagtatagcacaagaagagttttttgcgctatttttgatgtttttttcaaataaaaaggattcggattgattgtccggatcctttattgtagattagaaagcttgacaatttctttgacctgatcaatggtctgaatcaggtgaaggcttgtctcattgataggaagataatagactttatctgccaaagattctgtaaaaggacaattcgtgagtaagatcacctgttgtcctttttctttcagctctttcacttgctttctcaccttttggtaaaaacgctcatcacggatttctagatcatccaccaagacacaagcagcctccaaagccaatgattcattggttccattctgggtcagataataggctactcccgttttgacctcatataagccagctgatggctcaaccggaagaaagcctgggcttgttgcaacttctgctgctttttccattgctacaagattggctaggacctgcaaatagacaggtgctaatttactcaaatccaagagttcctcaaactcaaaaccacgtttcaaagcttctaagatatagaagagccggtggggcatatgacgagcaattttctggattaattcatcatcgctcatttcctcaggaaggatggtcaacaagtttttatctttaatggtttctagggcgtgttggtaagcttcatcgattctctttccaaatccataaactgccccataagagtgaatttgggtattgagacgggcatttttagcagcatccgaaaaaatcggaatcttaaagaagatatagtccaaacttggttcatagacagcctttagatcctttaataaagggtgaagcaaatgctcgagagatcgccctaattgtagctgaactccttgctcaaacaaggaatagcccaagcccatagaggccatcgagatactatctgatgcaaatggattaacctctaagatataaaaagcatagctcgtcggatccaatgcaaacttgatggaaatagctcctgtcagtttcaaatagcgactgatatggatcgctgcttctcgaagattttgaaactcccggtcagtaagggtgaccgctggcataaattgataagagtcactagagtggatcccgacaggatcaatgctttcgatagaggccgccaggtagtgattgtcttcgcgatctcgcataacgacaaaatccaattccttaaagccataggtcgaaaattctagcaaacactgctgacttggagagaccgaaagtcccgtttctactgcttcgcacaagtcatccaggttatgggcaatctttcgcccctgcccttgcttgctcgctaccggccagatcataataggaaattgaatgccttcagaaaactcgatggcttcgcgaaccgagccaaccagtgcggaagcgggtacctgataacccagctcttgaaagagtcgtcgttgatctgcctgctgataaaaactacgataacgttgaaggctcggtcccacaatcctaatcgatacttctttgaaaaatccagtttcctccaaacgaaacaagagattcaaaatctgtttatccgcaaaggctaagagcaaacgagatccagtataagaaagaagaatcgtcctaagagcatccagcttaagcttactgactacaacctgttctccagcttcttgggtgatagtattttcttcgcccagataaaggaccagagcattcccatccttggcattgagtttttgtgcttcatttaccgcagccaagaggctaatatcctgataagaatccccacataggagaagcaatttctggttttgattcatcattccttctcccttctaccttcgtgaattttggcatcaattaattctaaaaattcatcgtaaaaatagagattttcccttggccctggactagcatccacttggaattgaacccctaaaatcggttggtaacgatggcgaaaagcttcgatactatggtcattgacgttttcatgcgtgaccaataaatcatggggtaggctatcgcgtacgatactatacaagtgattttgactagtcatctcaatttttcctgtcgcaatttcacgaacaggaatatttaatccgaagtgtccaacttccatgggagctagctccgctccataagcttgagccagtacctgtgctcccaagcccatgccccagatcggaatctgtccattgagctttttgatcaagcggcagagttttttcacctgatggggatctccaggcccactggataaaataacgccatcgggctgctgttccatcagttcatcataagagatatcatagggataaactgtcacattacagtccctttgactcagctggcgtaagacagagtgtttgacacctaaatcaatcaaggcaatactctttccaaatcctggtacagcataggctgtttttgtcgagacttgacgcacttggtctttgggaaggactgtcgctcgcaactgatccaaaatatgctcaattgaatcccccttgttaatgacagtcgccttcatccgtccatacttgcggacaatttttgccacctgtctcgtatcaatccctacaataccagggattttttttcgcttcaagaattcatccaaggtcatctgttgccgccaattgctcggcatctccactagatgctgaaccactactgccaaacaagtgggtgtaatggattcagaatcatcccgattgatccctgctgcaccaataaccgggaaggtaaaggagagaatctggccactaaaagcctgatccgtgatcaattcttgatagcctgtcatggctgtggtaaagaccaactcaccagtcacatataggtctgcaccaaaggcttccccttcaaatacagtcccatcctctaggaccaataatcgtttcatcgaacccctcccttcttttacactagtccaattttatcatagttcctcaaaaaaaggaaagtcagattccatgtagctctctactctgtcctcttcctttcctttcaatgaattgtcagttatcttattttgcaccgcgacctttaaggacggcttcaatgatggccatacggacaaagacaccgttggtcatttgttctacgatgcgtgatttaggagcttctaccaagtggtccgcaatttcaacgtcacggttgactggtgctgggtgcatcaagatcgctgtatctttcatacggtcataacgttcttgagtcaaaccatgaagacggtggtagttttctttagagaagagtgattcgtaatcatgacgttcgtgttgcacacgcaagaacatcatcacatctacatcttcaatgacttcatcgatagtgacgaaggttccatagtcttcaaattccgcacttctccattcgtctggacctgcaaagtagagggttgctcccaaacgtttcaagatttgcatatttgattttgccacacgtgagtgatccaagtccccagcgatacaaactttcaagccatcaaagtgaccgaattcttggtagatggtcatcaaatcaagcaagctttggcttgggtgttgacctgaaccgtccccaccattgacgatagatgcagtgatcgttgggctttcaaccaattctttgtagtagtccacttcagggtgacggatgacgcagacatctacaccaagagctgacatggttaagatggtatcgtaaagtgtttcccctttgttcacagagcttgtcttcacatcaaagtcaaggagatcacatcccaatttcaactctgccacttcaaaggctttgtgggtacgagttgaaggttcaaagaaaaggtttgagatgatgtgttggtcttcgtaggctgctttagctccgtttttgaactcaatcccacgtttgatcaatgccattacttcttcattggtaagagtttccattgagacaaggtttttaagagcgatttgattttcagacatgttgtttctccttttataatgtgaatgcaaatagtttacaatttatttaagcttctttgatgaggacgcggtcttgaccgtctagctccaccatctcgacaatgatttcctctgacttacttgtcgggatatttttcccaacaaagtccggacgaatcggcaactcccgatgcccacggtcgactagaaccgccagactcactcgagcaggacgaccgtgactgaccagattatcaatggcagcgcgtatcgtgcgacctgtatagaggacatcatcgatcaaaatgacttctctatgagcgatatcaactggtaagaccgttgtatcctcagtcgccttcatgtcatctcggaaaggcttggtatctagttctgcaacagggacatcgatttgttccagctgagagaggcgttcttggatccggcgagcgatgtaaacaccacgcgtcttgatccccaccagcacaatctggcttaaatctttgtttcgttcaatgatttcgtaggtgatccgagtaatggcccgtttcatcgtcaaatcatcaacgacttctttggttttcattcagtcctccttagttgtaaaagaaaaacctcctttttcaaggaggttcagcaaatgaatggtctaagaggatagagtctcgccctatggtcctagccattgtttttcacagtctccttgcctgcctcacgggacaggattaaaggatttatttaattgagataactatatcacagtttcaaacgacatgcaagaaaaaactcaacatttttcaaaaaaatttaaaaacaagacttttcgtccgaataatgttcggtttttactaagaaacagccgatttccgcttgatatttttaatcccatagagtacatagccagctaagaggtaagcgataaagatgatcaccacccatttgccaacaaagccccagccgtatttattaacattgataaagaaataggcaaagggactatcttttgcacctggaattggccacttcaagaccaacccattgagaagggcaaagagcatgtaagcgaggggaatcaaggtccaaaggaagggatcgagcttacggtattgcttggctttatcaatcactagggtatcaaagaagaacatcaaaggaacgatgtaatgacaaaggaagttttccaaacgataaaacttctcaggtgtcgcgatgggtgctagcataaagtggtagatgacacaggtgatcataatagacatggtaactgcccccttcatacgaaggtagccctgagtctgggtcgaacgccctcgaaccatgcgccaaaccatatctcccataaagaacatgaccaacatgttagataaaatggtgtaatagagcatcatgccaaagccaccatgcttggtcagttgcagataaacaccgagtacacttaagataaacaatagaaaacgatagctaaataatagtttgaatttcatagtattctcctgaaagaaaagggggtagccccttcagtttaatcagtaactttccttaagtgaggacggacgtcagcgaacttctacgaagttccatgacttagttttgaacctaaagtttcaaaactcccgagtacttgaaacaatactgtttcaactacttttctcacagcggaaagttccattataaacttaaacaactctattaatttgtgtacttttctttagattttcttgacaaattctgatttgagtttcattgcgccaaaaccatcaatcttacaatcgatgttgtggtccccttccacgatacggatgtttttcacgcgcgtaccttgtttcaaatctttcggtgcacccttcactttcaaatctttgatcaaggtcaccgtatcgccatcagccaatttgtttccgttggcgtcaatcgctacgacaccctcttcttcttcgacctcagctgggttccattcatacgcacactctgggcacaccaagagcgctccatcttcatagacgtattcagagttacattttggacagtttggtaagttattcatttttatctccttattcaaattaactttcatagtataccatgaaagcgaaaatttgacaaatcctgttctactgtagcattttcaagaaaaaaggaggcaacttggcctccctacatggatgatattttcaatcttcctgcaattcttgaatatctcgaatcacgcgcacgcctgcttgattcttctcgcgcagttcagcttcagagtatgggaaggtattgatcaagatactctccatcccgatacttttggcaacagcgacatctgttgtaaagtcattccccaccatgaccgttttctcagggttcaactggtgttctttcatcacttccaagagaaactctggctgaggtttgcgaatacctgcatcagatgacaagtaaatggcatggaaaagttctctcaaaccaaccaaatcaatctccggattggtaaaatctgcttgggcattggataagagaaagattcggcaacctgcagctttcatatcctctaatacttctttcgtatgaagataaagctccaaccgcttgcgagaaaggacacggaaagtccgcgcaatcaaacgtccccactctttgaggtgggaaacactatttccacttggatgactttctaaatacaattgcacaaagatgaccgttagatcaatctctgggtaggcaacttgtttttccttagccaagtcttcttcggcttgttgcaccaactctttataacgcaggcgcaagccttctcctgtgtagcttgccccgtaggattggtagatctgagccatggtatcccataaaatgggactcgactcatcggtttcgatgtcgaccaaggttccataaaaatcaaaaatatagtttttaaatgcgtacttgtgcggattcatctctcactcccgtaacaaacattgtaaaggttgccttgcagacattggccccatcttgattggtaatatcgacatccacaactcgagtcgtccgtccactgtggacacattcgccatggatcgtgaggacatcacccagacgccctgctttcaagtaattaatcgaggattgcaaggtcaccccatcgaccccttgagaaaccacgaccaacccactgacttggtcacacagggtaaagagatagcctccgtgcgcatttccataataattgagcgatgattccacgaccttggttgtcaccactacatgtccatctctcatcttttcgatttcataattttcaaatgcagcaattgcatcaaagtgaaaatctttcatatacttgccaccttttctagcatcttttcaactcctctatcatactacaattaagaagcagatacaagcaaaggggcaattccttagaagcagaaaaggagactccaactaagtaagaagacgatactaggaacaatgtattttcttgggtgcttccaacattctctctttaaattccattttcttaaagggaaatagatttcaataagtaagtgcaaaacaccttccactactgctagaatcatcactcctagtaaaaataggatccccaagtcaggcatgaccaccatttttaataaaagagcaacaaatagattcacagataggaaataggtcagcaatacacggtaatacatcaggtaaaagaacagactcttaggaagagacttaacatgatcgatcaaatctttatcagcggaaatgagagtggttaatggcgtattgacagaagcaattgttaaaaggatgatgatttttaaaggagcatcataatcctgtatcagaatgagaaggaggaagatgagagtaaagacaaaattgatggaaaaatagcgctcttgaaataaggaaatccaaaaataattgccacttcttctctttgcgacgagcaactgattatgttttgaaatcgcgatcaagtcctcatttttaaaaataaagacagcaatgaaggctgaaagtaagatcatataggacacttgttggacccataaagaagatactgtaagaacagtcgttacagaaatgaggactcctcctagaaaactaggcctggtattgaactggataaagacataaaacacacttagtatcactaggaaagataggaagacaagcttaaaggattgtagcaggtctaacctgactcctaaaaagaggatcaataacaggacgcgctctagtaaattgagaagaaaggttaccgtcagaaaagaacctttgaaacgattgagagacaaaggaagctggtaataggcctggaccctctccatcgaaaaataggaatagagcaattgaaaggttgatagagcagtaacaatagccgtactgatcaataaaacttgaaagctcgtagaaaatttggccccaacaagatggtaataaagagcaaaggctaaggaagtcaagaacaagaagagccgatttttggataccacatctctaaaaattgctagtagcatgctctaccccctctgacgattgacgtcatgaaaccaatcttctaaattcgattcgattgcgtctaggtgaccatcttcaatagaataagctgtatcacacacccgaacgatactctctgctatatgcgaactcatcagaatagagccttcttctttatactgcaatagcaaaccatatagaaattctgtcgcatcaaaatcaaggccatcaaatggttcgtccaaaataaggaggggaggtttgagataaaaagctgtgatcaagaagactttcttcttatttcccgttgacaaactaccaatatcggtgttgagatactcttcaaaatgaaagcctgagatcaggtcctgcaaaaacgtatcatctctctttcgatgatacaaacgacagacaaaattaaaatagtgaacaaaatcccagtttaaaaaactattgttttcagtaaaaactgtataggtacggctcttatagaaattcgtatgaaaagaggtcgccttgtcttctatgataacagtctcaactgcatactgccgatgatcaaaaacactacttaaagcttttagcaaggttgtcttcccagctccatttcgaccaatcaacccgactacagaatgattgggcacaaacaaattcgtgtcttttataatgggcttgtcttttttataccaaacatttagccccttgatgtttaaacactcactcttcatcgacgcactcctttataaaggtaagaagccccaaccaaaagcaacagcaaagcgtataaccattccttttgaaaggaaaagactaaggcaccgatcaagaagcaaattcctataaggattctaaattgtaatttcatatcttgccttctttctattcacagtatgaaagattacaattgtattttatgcttatactatagtactttttctgagcagattcaagcacgaatggaatattctttcttctttcaccttacaagttacaagcaaaaaaagctagatgtctctagccctttgcttaaaatcttaatttttcccaatcatcgtctgttcgtttgcgataatagtactcagacaaatctgggtcttccatcacttccagcagaggcagcatatcgtaggacaagtctaactgatctaattgatccttctcaacccaagaaacttctccttcttcagatgatctgagctggcctgtaaattctgtcgctttgtagcaaaagacgatgtagcggccgccctcatcttgtggccagtctttgactgcgaccagttttggatttgtaattgtaagtcctgtctcttcgtagatttcacgaatgacggattctacaaggctttctccttcttcgatatggccacctggaaaagcatagccagcccagtgagtcttttcaggtgagcggtattggaggactactttcccattttcaagatcttcgaccatgcaaagattgcacagtgtagtaggcgttgtacgtgacatatatttcctttctatgatgtaatacatcaatcaaaataaacttttttctttacttctttcttcatcacaaagggatttaccagctcatggtattcatcaaaattatccaaaagaaagcctctctcaaagataatggtctcctcttttaacgaatattccgagtaaatcgtaaccggaccctggccatcaaaggtaaagatcaactcaatgaaaaataccagaatcaccatagcaaagagactcaaaagaacactaacaagattcttccaatttggagcatgatttcgatagaagtgatacaagatgtgactaaaagccgtcacagctccaagatacagccagggattccaaagaagtggcgtaaatgcgtagccaaacaatccaaacaggaagttgacaaaaacaaaaagtagcaagatcagatacataatcctaaacaggttcagatactttctcatgtttgatctccccttcgtaataattggtttaaactggatctcctaaagaaacatcaacagaatatgataacccaatcgaatccaatgatcaatttgaggcgcatctggatcattttttttactatctaaaaatagacttagcgataataaaagtaagctaagagctataactattctaagaacgagtctcataccgccaagagcaaaagaaactatagaaccaattagtggtaaaggggaaaatataaatgccactaagccgaaatagatcttaaccaatgataaaaccaataaactataaacgacaatcttcgtaaaaagagagacccttttatcttcttttttcagttgtgaaatggaatagatgacatagatcatatacataaatagaaacatatttatttcccctatttccaatagattttattcctattttatccaacatccgttaagaatacaaccgcttgcctggacatgtccaacaaagacgaggacaggatcagagtttttttacttctgctgctaccttttggagatgcttctcccgcatgctagcggtgttcacatctcgtccgacttctcccaagatgcagacgcgcttggttttaatcccacagtggttcaagacagcattcttcaaaacagagatgccataactatcaggaatgttgagagggcctgaaaagatcttataccaccaagtaggtgccatggaggtcacatatatactggctgttttccctttgagcaacttcttgaattgcttgcctctgaggtaattccagatgaagctaccctggtcattggctgagtaggcaacccccggtgtgaagacccgatcaatccatcctttcataaggctcggcatactactccaccagatgggataaacaaagatgaaatgatctgcccattggattaattcctgagaacgaaggataaaggaatcttcttccatccgctttcgatagccgtagcgaaggacaggatcaaagtcctcttcattgagactgatcactttaagctcgtggcgatttgagtcaatagtttcgacaatggtttgaaaaatagcctgacagtaactttccttatccggatgcccgttgatgactaaaatcttcattcgtcttctccttcatttctttggttcattctatctcttttatttttttacttgattaattgataatggttcaaagattgatagataggtcctttagaaatttttatttgaagaacacatcatccgcaattccttaacaggttttccaaggtcaagtattttttcttggtcatcaaaagtaaaacccattttttgatagaaagcaatggctcgcttattatctttcaatacccataaataaatttcagagaaatgatcgagaacggcaaatgcagcgtgcattaactgttcactcacaccttttccatagtaatcttttaaaacatataaggcaatgatttcaccagcttgaatggcttcatcacgaaaatttccatagctgataaatccaatgaccttctttccatccatcgcaatcaaggtgttttctggatacttttgactaaagaaacgacatttttctaatgtcatcgtctcctgaaaatccgcgggtaaaagatcgtcataagcctctctccacgtttgccagtgaacgagagatttttcttctatctcttcaggagtttccattgttttaatgataatcttcattcgatttatcctaactaatccaaggccttgacttccaacatcatatcgcggatttgtgctgccaactcaaagtcaagcacttcgacggcttcttgcatttggccttgcagtttcttgatcagttctttgcgctcttgccggttgagactagtgatatccacttccttatcctcttccttggccaccgccttggtaacagagatgaggtcacggatttccttcttgatggtttgagggacaatgccatgctcttcgttataagccatctggattttccgacgacgggctgtttcatcgatagctttttgcatagactgggtcatggtgtccgcatacatgatgacgtgaccctcactattacgggcagcacgaccgatggtctgaatcaatccgcgttcattacggaggaaaccttccttatccgcatcaaggatagcaactagactgacttctggtacgtcaatcccttcacgaagaaggttgatcccgaccaagacatcaaaaacgcccagacgcaaatctcgaataatctccgtccgctccaaggtcttaatgtccgaatgcatgtatttgaccttgacacccatttctttgaagtagtcggtcaagtcttctgccatcttcttggtcagggtggtgacaaaggtccgctctccacgttctacacgcgcattgatttcacccaagagatcgtccatttgtcccatggtcggacgcacttcgacctcaggatcgagaagacctgtcggacggataatctgctcgatgatagtatccgtttgctccatctcataatcacccggtgtcgcagacacatagacaatctggtggacatggctttcaaactcttcccgacgcagtggccggttatctaaggcagacggcaaacggaaaccatagttgaccagcatctccttgcgcgagcggtctccattgtacatgcccttgatctgtcccatggtcatgtgactttcatcgatcataatgagaaaatcttctgggaagaagtcaagaagggtgtatggaggctctccttcactccggccatccatgtgacgagagtagttttcgaccccattggtgtagcccatctcccgcagcatttcgatgtcatactccgtccgttgtttcaggcgctgggcttctaaaagcttgccttctttttcaaagaccttcaactgctcctcaagttccgcctgaatcttggcgatggccacttccatatggtcatcattggtcacgaagtgagtggctgggaaaatggccaagtggtccacatctcccagaacctggcctgtcaaaacttcaatctcccgaatccgctcaatctcgtccccgaaaaactccacccggaaggcatgttcatcacgcgaagctgggaaaatctctaccacatctccacgaacacggaatttcccccgttgaaagtcgatgtcattgcgctcaaactggatatccaccaggtcattgagcagtttatcacgagaaatctccagacctggacgcagactcaccacgctatcggcatattcctttggcgaacccaaaccataaatacaagagacggaagctacaacgatgacatcgttacgctccaacaaagctgaggttgcggagtgacgaagtttatcaatctcatcattgaccgagctatccttttcgatataggtgtcgctcgatggcacataggcttctggctggtagtaatcatagtaagatacgaagtactcgacggcattttcagggaaaaagtccttgaactctccatagagctggcctgctagggttttattatgggcgatgaccagggtcggtttattgacttgggcgatgacctggctcatggtataggtcttccccgtaccagtcgctcccatcaggatttgcgccttctcaccaccctcgatgttatccaccagctgttcaatggcctgcggttgatccccagacggttggtatttcgatactagtttaaatttattatctgttactcgattaatcatctctttgtcctcacatatatagaccttattttaccataaatcactagaattctctgagatgaggaatgaaagggaaaacaacatattacaaaataattaattggacacgcattagagtgaaaactaaacaagactctcgcaattacttcgaaagtcttgtcttttattctaaaacaatgtaatacgtaataaacatcagttccataatgtacaaaattagcaagttatgctcatcggtatcatttttacgaaatcaatttactacttaacttcttggttccttaccaagaggtagagagttgctccaagtgagcatacaagtccaataacgtacgtacagagttgcaaaaaggaaactctccctaatattgtttccgcaataatattataaaatagataactagtcactggttccactactctttctatgaatggttgtaccaaaataggaaatagcagcaaaatagctaaactccccattggacttttgaaaaaataacttaagaagtaagaaattaaaaaatattggatggagccaatcaaatagaaactgaaaatttctaaattgacaccattttcgctacttaaaaaatgaaaccatataagtagtacaatgaaatataaggttgattgtagtactacatcacataactctacgaacaggatcctaattgaacttaagatcctttttccacttaccaaataaaccagttttgtttcgtgagattgtaactcaacaaatgcattaacacacccaatactaacagagagcattgatgcaaaaacaagagcttgctttatagataattgtacaacagtatcattgattgcaactggtaaaacacctaagagacacacaaaacctatcaaaagtgactgtatagctatctggtactttacgggttttaaactatattttttgacgataagactaaaagatattcttgccattcttcctcctcattcgaatcatttctacaagcattatgaataccaagaacaagatcccttcaactactaaaagtgtaaatccatataattggctcgtttgagtcccttcaattcggccaaaagcaaatgactttgctccaatcaaaggcaagagattttctattttagaggaaagtcctcttaaaatacctgataaagtgattaccaataataaaacatctgcaattaatgaagtcattgattttttcgttactattacgaaaagtaaagctaataaagtaagaacgatcgcaaatatcataactcttaccgtaacatctaaaaacaaagtaaattctaaataattctttaaagttgaatctagaaaaacgagtaaaataatagcgtttactatagaaaatattaaagtagcaagtaacgataagacaatcgaacttgcaataaacccagtaagacgaactttccagtttgggatcaacaactgagtaaaattatcatcaccaaattggtaatgggttgaataaacaagtgaaactaagattggtaagaaaataacacttgcttggtagggtgaggataagagagcatccctgactgtatagactggattcgatgatagcatagatggatcaaggttaacagcctgtccatttccttctactaaagcatttatcacctggatattttgaattgaaaaaaatatgctgactcccaaaataagaaaaaaagtaaatttaaaagtaggtaaactactatatttataaaggtcactaaaaaaggaacgcttcaacatattattcaccttctttcccttcgagtgccttaaaatatgcttcctcaaaagatccaaactgtttcaaaatgtctttggtaggagcatcaataacaatcttcccattagaaatcccaaccagatgatctacagttaattctaactcactcatataatgacttgtcattaatacagtcttaccttcattgacaaaagactgcaaaaaattgcgtacccagcgtataccctctggatctaatccattgattggttcatctaaaattaagatatcaggatttgctaataaggctgttgctaaaccaagacgttgcttcattcctaatgaatagtcttttacttttttatttttagcttcacttaaccccaccaactctaaacattcgttgcacctatttttgtcaacgccacaagccaagccaatccaccgaagatgctgaaatcctgttctagttggataaggttgacaactatctaggaatgatccaacaatacaaaaaggattatctcccaattgagagtattttttcccatcgatcaacgccattcccatttgactattttctaaaccaagcaaaattctaattaaagttgattttccagatccattcggtccaatcaatccagtaatctcacctttcttggctttgaaagacacgttttgaaggacaattttactattatattccttatgtagcttttgaattgttatcattcattctttttcccttctgatttttagtgaaattccaccttcacttgaagcaagtataacaggagaaaatcaggaaattctcagaataattatttttttcattttcaacaaattacattctatatttgctataatatgctcatataattggagggactatgaagcataaaattttagccattgacgatgatgaaaaaatcttacgattaatagcgaatgcattaaaagcgaacaactttcacgtggaaactcgtaaaaatatagaggagattaatatctgtgactttactggattcgatctaattttacttgacgtcatgatgcctatttctggtttagaaatctgtcgttccattcgttcacaaattactactccaattctatttctaaccgctaaagattttgaagaagatttactaaaaggaatacaagccggggcagatgattacatcacaaaaccattcagcattaaagaattaattgcaagaattcaaatgcatcttcgtagagaagaaagatcacaccattcctctaaagaagagatggagtcaaatataactttttatcgagatagtcaagaagtttattatcaatcaaagagaatttcattaactaagcgagagtttgatttactttatcttttagcaaaaaatgagaaccgaatatttagcatagaagaactttacaattacctctatcctgtagactctgatgcacaactacgatccattactgaatacatctatcaaatcagacaaaaatttaagattcatcaaattgatcccattaaaacagtatggggaggtggatacaaatggaaaaagaattgacaatcaagcaactcattaagcgtacctaccttaaaatcatgtggcaatttcttctatgtctgatacttttttacatagttccaactcttctatcttctgtatctggaattaatgagaaaaacgccaatcactttgctttattttttagcgtcagttcttggatttatctttgcatcattttaatttttatcattgtaataaatattagacggttattaaccaagattcaaaaagaaatgaacatggtttatcatagtagtctatatttcaccaaaaatgaacatcaccatttgcagattaaagaattcattgaaacaaacgatctgattgaaagaatgcaatctgatataaaaaatagaattcaaaatgaaaaagatcaaaaaaaagaactcatgtttcaagtatctagcgctgcacatgatcttcgtagccctctaactgtcatcagaggaaatgctgaatttctacaatccaccgagcaaacacctcaaacaatggaatgtctaaaagaccttgagcaagcaagtattcagttaaacgattattttaacaactttatccaatattccaaaactttttacgaccatgatatccaacttgaaaatatatcaattaaacaagtaactcatcaattgaaggaacagatcactcctttactccctagaaatacgaattttgttttttcaaatacagtaactccatcgacacaaattgccattcattccaatctatttttccgagcaatcaccaatattattaataatgcaatacaacatcaacaagataatgatgcaaagatccagctaacaatgtcacaagacaatggtcaattagttctaactatatggaataatcaatctagtttttcaaaaaatgtattacaacatgctggaaatcttttctataaagaggaccaagcaagaacaccctctcaagaaagtcactttggacttggtttatctttcgtgaaacgtgtcatgaaacttcataatggaactatgcatttagaaaatattcataatggtgcacaagtgaaactaatcattcccattattatatagaaaaagccgaactcatcattatgtgttcgactcaaaacgcagacaaacgtcatttttggtgtttgtctttttcatatatgactttcagacattacacagaggttagtcatcaaacttttctttcctttcccctaagcgatgaacaatcactagggatacaagaagaaccaaagtggtaatgattgatccttctgctccaaatgtccctccggtcaaccagtcgggtccagatcccatggtaaagctaaagatagacgtatctgcgcctgtgccactgacttgaaaaccaaggagatttccttgtacatagttccaagtgccgtgttgggcgaccactagccagatactatcggtatagataaaaagcagaccagctagcaccccatcaaggatgatattcagaacggataagaaggtcactcctgcattacccatatgcagaatgccaaagagactactagaaatcacgatcgataaaggcaaattggttcttgcagcaatccgagtcaggagccaacctcgtgtggccacttcttccgtccccccttggagaagccaaaatgggaataagcctaggataaagaggatgggttctaaacttaattcattaagctcaaaagacccaattccacttacttggtagacaagcgcgatcactcccatttgaacaagggaaaacatgattccccaacctagatacttaagccaattcctttttacaaagcctaagcttgataaggcattcttctctatgaccttcacccaaaaaataaagaggaacagaatgattacaaaactgaagagctcataatagagaaaataatggtagaaaaattcttgaatacttgctgtcccatttcctggcgaaaagaactccactagaaaaccgatcactaaggaaaatggccccacaagttcactaccaatccaaagtcctccttctataaagaggaatgctaataatacatagaatagtatagaaataagaactggcatagatgtgtttgtttttatatcctgaatgatctttcctttcttcatgatcaacctccatttatctaataggtccattgtaacaaagaaaatccagagctgcaatatcgtttcatgttagaaaacctaacatcaaaactggatttttcttgcaaagcaaactattttctgatataatagcttttgtagaaaaacataaggccattcatactcgatttggtatggatgatttgtttttttaaggccatcctttggtcaatgtgctcatgggtcaaatccccaaagagaaaagaattataaggagacagaaatgaagaaaaaattactagcatgtttgcttttcttatttccattcgttgcattcgctggtcatgctcatgctgaaacgatcaaggtcgttttcgatacagcgtatgcaccatttgaatttaaggattcagatcaaacctataaaggaattgacgtagaaatcttggacaaggtcgctgagatcaatggctgggatttggataaatccttccctggatttgatgcagcggtcaatgcagttcaagctggtcaagcggatgccatcatggcagggatgaccaaaacaacagaacgtgaaaaagtcttcaccatgtctgatacttactacgatacaaaagttgtcattgcgactaaaaaagctgacaaaatcactaagtacagccaattaaaagggaagacagtcggtgtcaaaaacggaactgcagcccaacgcttcctcgataaaaacaaggacaaatacggctataagatcaagacctttgatacaggtgatctcatgtacaacagtttatcagctggtgcagtggatgcagtcatggatgatcaacccgtcattcaatatgccatccaaaagggtcaggatctagctatcaatatggatggggaagcagttggtggctttgcctttggtgttaaaaaaggtggtaagcatgaaaaattgatcactgaatttaacaaggccctcgctcaaatgaaagctgacgggacacttgatgagatcatcaagaaatggacaggtgaaagtcaatcatcaagtaacagtgctgttccagaaacaactactcctgctggtcaaaaagcaacccctaaaaaatcaaaatatagcatttcaagtgattcttcctttgcaccatttgtcttccaaaatggaaaaaacaaatacacaggaatcgatatggacttgatcaaggctattgctaaagaccaaggatttaccatcgagattgacaatcctggatttgatgctgcggtaagtgatgttcaatccggccatgcgcaaggaatgatcgcagggatgactgttacagatgctcggaaagaaacatttgatttttctgaaccatactacacggccaattctattctagccgttcaagaaagtagcaagattgattcttatgatgaccttaaaggaaagacagtcggtgttaaaaacggtacttcctcccaaaacttccttgaagagaaccaaaagaaatatggttacaagatcaaaacgttctctgacggagcttctatgtatgacagtttgaattctggttctgttgcagcgattatggatgacgaacctgttatcaaatacgctattaaacaaggacgcaaattcaaaacacctatcgaaggaactccaagtggtcaactagcatttgccgttaagaagggtgaaaatcctgaattgatcgaaatgttcaataacggacttgcgaacttgaagaaaagcggtcaataccaaaagattcttgataaataccttaaatcagatagcaaatctacttcaagtacagccgtagatgaaacaacgatttggggcttgctccaaaacaattacaaacaattgttaagtggtttgggtgtgactctagcccttgcacttctctctttcgcgattgctatggtgatcggtgttatctttgggatgtttagtgttagcccttataaatggctccgctggacagcagaaatctttgtcgatgttattcgtgggatcccactcatgatccttgctgccttcatcttctggggaattccaaacttgattgaatctgtcacaggtcatcaatccccaatcaacgactttgttgcaggtaccatcgccctctccctcaatgctgctgcctatattgcagaaattgttcgtggggggatccaagctgtaccgattggacagatggaagccagccgaagcctgggaatctcctatggcaagaccatgcgtaagatcattttgccacaagcaaccaaactcatgcttccaaactttgttaaccaattcgtcattgccctgaaagatacgactatcgtttctgcgatcggattggtagaactcttccaaactggtaagatcatcattgctcgaaactaccaaagtttcaagatgtatgcgatccttgccgtcttctacctcgtgattatcaccttgctaacacgatttgcaaaaaaattagaaaagaaggttaactaatggctaaattaaaaattgatgtccatgacctccacaaatactatggtgaaaatgaggtcttaaaaggaatctcaacaaaattctacgaaggggatgtggtctgcattattggaccgtccggttctggtaaatcgaccttccttcgtagtctcaatctcctcgaagaagtgacaaaaggtcaaattaccgtaaatggatatgatctaaccgatccgaaaaccaatgttgatttggtccgtgaaaatatcgggatggttttccaacacttcaacctcttccctcacatgagcgtcctagaaaacattatgtttgcgccagtagagcacaaactgatgactcgagaagaagctcaaaaagtcgggatggaattgttggaaaaagttggactcgcagataaagccgatgccaatccaaacagcctttccggtggtcaaaaacaacgtgtggctatcgcacgtggacttgccatgaatccagatattatgctctttgacgaacctacttctgcccttgaccctgagatggttggagatgtattgaacgttatgaaagagttggcagagcaagggatgaccatgatcatcgttactcatgaaatgggatttgcccgccaagtagccaaccgcgtcatcttcacagcagacggtgaattcctcgaagatggcaaaccagaccaaatcttcgacaacccccaacacccacgtttgaaagaattcttggataaggttttaaacgtttaaaaagataaaaacgagtggttcctgaagcatctagcaattttgctagatgtttttttagacgaaaaaagaggctgtgacaaaagtcctagcctctcaattatttttagattgtcgagcaagacgcagtggttgagtgggctctactacgctgatttcatcagcttttatagccctactcaactgtgcggaggtgggacgacgaaatcgaattctaacgaattaccgatttctgtcccactctcttttcattttaactaatctgttgctgagctgtctgcatcttgtagtaaacaccttgcgcttgcattagctcttcatgagtaccatgctcaacaatatcgccatccaccatgacaaggatcatatcggcattttgaatggtagacaagcggtgagcaatgataaagctggtccgtcccttcatgagctgattaaaggcgtcttgaatcaagacctcagtccgagtatcgatggaggatgtcgcctcatccaagatcaaaatcttaggaactgaaaggaaaacccgcgcaatcgttaagagttggcgttgaccttgggacaaagactctccagcatctgaaagataggtatcgtacccttgtggcaactgccgaatgaagaaatctgcattggccgctttggctgcttctatgacttcttctctagttgcatctggacgagaaaaggcgatattttcatgaatggtcccgaccttgagccaggtttcttgcagaaccataccaaattgttggcggtaagaagcacgagtatagtccgtaattggtaccccatcaatcgtgatctctccagaattaacagggtagaaacgcatgagcagattaattaaggtcgattttcctgctcctgtaggccctacaatggccactttactggcagctggaacatgaatggttaaatctttgatcaaggtccgccccaaatcatagccaaatgagacatgctcaaaaccaatcgcacctttgacatcctgactttccagaatctgatggcctgtctcttcgacctcagcttgatccaagacgctgtacaaacgctctgcacaggcaagggcactttggagttctgacaagacagaagagatatcattaaaaggcttggtgtattggttgacataattgaggaaggtcaccaattgaccaacagtaaagtgagatcccgaaataatgcgtacagcaccaaatccagccactaccgcataaatcaaggcattcacaaagcgagtggcagggttgacagttgaggaataaaagacagcggattgggaataattggcatagctttcattcgtccccttaaaagccgtacggaattgatcctgagcattaaaggactggatcaaactttcctgggtcaaggactcttcgatcaactgagtttgaagaccacgcgccttggtctgcttttggaaaagcgtataagaacgcttagcaataaaacgagcaatcaccagggataaaggggtcaagaccagaacagccaccatcataaagaaatccagttctgccatggtcacgatggtgacaagaatggttaagagccctacaaagaactggttaaaaaccatgagaagaccgctattaagttgctctacatcggtcgtgaggcgactgacaaagtccccgctcccttgtttatctagataagacaagggcaatcgatgcactttttccatcacttctgctctcaggctttggctaaaccgatagaccaattgattgtagacaagaggattgatccattggatcagggtattggccacaatgaccagaaccatttggatcaaaacaggccataagactgtcatcccttgaggattgatgactaaatcaactgcatgtccgatcaggatcggtaaccaaaccgttaaggccacttgagcgatggttccgagactagctagaatcaggagcacgggatggtgagcaaaatctctaaacagacgttttaaataactagaacgtttttgactcatgcttcctccctcctgtgttgtgaataatgaatttcttgataaatctcattggtagacaagaggaaatcatgatttcccagtcctacttgatgtcccttgttcaagaccaaaatctgatcagcagacttgagactattggttcgttgagatactaggatcaaacttgtatcactcaattcttcttttatcgattttaagagacgtgcttccgtcaaataatccaaggcagaggtcgaatcatccaaaattaagaaaggagccttcttcaaaagggcacgcgcaatggtcaaccgctgacgttggcctcctgagaaatttcggccaaaggcttccactggctcatcgagttgtccttctttttcacggacaaaatcagccgcctgagctgtttctagggcccaccacaaatcatcatccgatagaccttcttccatccctagtaagagattcgagcggatagtccctctaaagagctctgccttctgtgggacaacagccacccattcccgccactccttgagagtttgaggagagtgaccttgatgatagagggctaatttcccctgactaacggcatacaaatgactcaataactgaaccagggtagatttcccagatcctgtaccaccgataattcccaacatctgtccatgatcaagatcaaaggaaatattttctagagctgggcttgaagccgttggataagtgaaagagactttctgggcgctaatcgcttcttgctctcttgcagtttcttctggcagagcttctaagaggtcttcttccttcaaatcaaaaatctcttggacacgcttggctgatatatagctgacatttaaagacgtaaccagcatagccagtttgatcaattctgttaaaatttgtaataaataattgaccaaagcgaccaacatcccttgggttagaagaccggcagagatattcaattgtccttgccaaatgacacaaaccaaggtcgtattgaccacaagaaaggtcaagggactcaccaaactagaccagataccagcacgaatttgccagatcttgtagtcctgattgacctctctaaaatcctctaattcaccagactgttgtccaaaggcccgaatcactcgcatcccttgaaattgctgacgcgtcaccgtgaccattcggtctgtgattttccgaatcttggcaaaaagaggattgacaatccgagacatgatcacaataatcaaggttaaaatcgccaccatccccaagaaccaaagagtgagtttaggactgatggtgaatgccatgatgatagaaccaaagacaataatcggtgctctcaaaaagaggcgcaagaattggttgatcccaacctggatttgataggtatcagaagtgagacgggttaccaaactagaagtcccgatcctatcgcgcttgtcctttggaagtgataagatcttctcatacaaatccttggtcatctcgcgggtaaagccgacagctgctttagaagaaaaatactgggctgtaatagctacgacaacaccaaagctcgcaaataaaaacaaaacaccgaccatcatcaccactgcgctcgtttcctttttcggaatgacctgatcgactaagtgggcgatgattaaggggacacacaattcaaaaatagcttctaagagtttaaaaacgggccctagaaaagtttcccatagataacccttaaaatacttcaataatgatttcatacgactcgattctttttttatggatatacatattttaccacaaattcttaagatgaaaaaactctccctgcagagcagagagagttgaatactgaccagatgtggtcagcaattttattccgtctttgtccccttttttaagatcttgcccattttccccaatccaaacatcaagagaggaaaagagaacagcgttataaggcctaatacgataaagactgctacaaagccacagctatcaatgaaccaaccagtcaaagggaacatgacaatcatagagagactaaacatcatcgaattgatactcagcatggttgctcgtacactggatggcagataagcttgtaaatcattgtagtagatgggttgataaactgcataaagggcattggtcaagagatagacactcaaataggcgaatggagtcttcacacctaccaaaagcaaggtcaacccagtcagtgcaaccagaatcggaaagacttgattactattccattttttcccgatttgactggccaaataaaccgctaggagattgaatccactaccaatcaacatgataagcgaaacttgccaactagttaagtcactaattttctgttggtagtaaaaataaaacatacacatgatggtccctaccaactgataggtgagcatccagtaaaacaagactggtttttcctgccattcttgtttcactacctccaatatccgctttaaggtcaaatgatttctttcatcactcttgctctctggctctttcatcagaaagatcaaaagaatggaaagcaaggaaagcccaatagcaatataataggtccaagccaatgctccgtgaataaagaagcctgccacaactgtacctaaagttcgggtgacttcggccacaccagacaagaagctagaaatctgaagataacggtctttttgacctgcttccacagctgaatcaaataagaaagctgtactggtccccgagtcaaaattataagaccaagcattgaccatcatagcaatggcatagatccaaaaattcccctgaccaaataaaatcaagatcgaagatccaatactggacaagcgagccaaatagagattagtcttgtagctaaatcgatcggccaacataccagatggaatctcacataaaaggctcgtcccatgaaagatactctctaatagaccgatttgaagtaaagaaagaccattctgaataaaaaataaaatccaaaaactggtgattccaaaataagatgtaaattccaaacctgctaggagtgaaatattgcgtttgtaagttcttttaaacattgtttttcctctttcaatagattatataagtgtttctaaaagacttacttagatttgcctacatcttctccacctccttcattttttcttgattcatttcttgacgcagctgggccaattgattagacaaggacactaacaattcggtttgcaacttttgaatttccagtaaatccgtctggtcttgttgcaccatatgatcaatcttcgtatgcagtaagcgaatttctctttccgactccatattgacgttaaagtcatttcgcgcttgcaggcgatcataatctgctgccctgttttggctcatcatgatcaaaggagcttgaatcgccgcaatagtggaaagcgcaagattgagcaagatgaacggataaggatcaaaattcaagccaaaaggatgcaggacattgatcagcatccagatagccatcatcaggataaaactaatgataaaagtccatgaaccaccaaagcgcgcaacagaatccgccacccgctgaccgaaggtatagctggctgtcaagcggtcttcaacgttaaagggacgctcgctttcaggcatgacagctgttacctgctgtttaatcgcttcatttttatcatttgcacgctcaataatctgtccaagataatccatacaatattggctcaaatttttatacgtgataaaatcatccatttgactttccggataggaagtcttgagcatctgttgaatgctatggtctagatctgcgatcaaagccccctgaccatcctcgtattctttcccatcgatgatgtctattttcagcattgagtttcctttcatagtttttaggagcagatataaaagttaaaaacgcctaatggcgtttttacgtctattaaggtttgatacgatgcaacatacgtgggaatggaatagcttcacgaatgtgttttgtaccagccgcgaaagtaaccatccgttcaatcccaataccaaatccaccgtgtggaactgtaccgtatttacgaaggtcaaggtagaattcatactctgtacgatccatgccaagagattccatcttcgcaacaagagcgtcgtagtcttcctcacgcatcgaaccaccgatgatttctccgtagccttctggtgcgagcaaatctgcacaaagcacgcggtctgggttcccaggaactggcttcatgtagaaggccttgatgtcagctggatagttgatcacgaaggttggcacaccaaagtggtttgaaatccatgtttcatgtggtgaaccgaagtcatctccatgttccaaatgctcataatccgcatcttcatcgttttcatgctcttgcaagagatcaatcgcttcatcgtaagtgatgcgtttgaatggttcagcaatgtagcgtttcaagagctccgtatcacgctccaatgtttccaaggcttgaggagcacggtccaacacaccttgaagcaaagctttaacataagcttcttgtaagtcaagtgattcatcgtgtgtcaagtaagagtactcagcgtccatcatccagaactcagtcaagtgacggcgagtcttagatttttcagcacggaatactggaccaaagtcaaagacgcgaccaagggccattgcaccagcttcaagataaagctgacctgattggctcaagtaggctggtgttccaaagtagtctgtttcaaacagttcagttgaatcttccgccgcatttcctgaaagaattgggctatcaaacttcatgaaaccgttcttatcgaagaactcataagttgcatagataatagcattacggatttgcatgacagcgacttgtttacgtgaacgcaaccacaagtggcggttatccatcaagaagtctgtcccgtgttcttttggagtgattgggtaatcttgagattcaccgatgacttcgatgtccgtaatatccaattcgtaaccaaatttagaacgctcgtcttctttgacaataccagtcacaaacactgatgtttcttggctcaagcgtttaatggtgtcaaatttttcaagtcctacttcttcgccgaatttttcgataaagtttggtttaaaagccacaccttggaaaaaggcagtcccgtcacgcaattgcaagaaagcaatttttcctttacctgatttgttggccacccaagcaccgatggtcacttcttgaccaacatagtcttttacttcgatgatagtaatccgttttgtcatcattcatcttccttttctcgttaaacttgtccgaagacattatcttcttaattgtatcataaaaaggctttcagtgctagattctacctgtgaaaaccagatattttttaaagaaaaagatcctcagctcattactaaggatcttacgattttatttttccataaaggccttgagtcggcgaacagcttctttaagggtatccaaatccgtcgcataagacaagcgaacattttcaggggcaccaaagccagctcctgttactaaagcaacctctgcttcttctaaaattgctgtggtaaattccgtcacatccgtatagcccttcatctccatggccttcttgacatttgggaagagatagaaggctccttgaggtttgatggcttcaaaaccaggtacttcattcaataaaggataaatagtattcaaacgctcttcaaaagcctgacgcatgatctcaatagaagattgatctcctgtgagggcttcgattgcggcatattgggaaacggttgttaagttggatgttgtttggctaatcaccttggccatagctccgataatctcaggatctcctacagcaaaaccaacccgccaaccagtcatagcataggttttagaaactccattaatcacgatagtttgcttgcgaatcgcttctgataagctagaaataggcgtaaaggtattgccattgtagaccaatcgcccatagatatcgtctgccaaaatcaagatgtcatgttcgacagcccaatttccaattgcttcgagctcttctttactgtagatcattcctgttggattggatggcgaattcagcaagaccaccttggtcttgtctgtccgtgctgcttccagttgttctaccgttgccttgaagtgattttcttctgttgtttggaaagtaacaggtgtgccctctaccatcttgacctggtctacataagaaacccagcaaggggttggaatgatgacttcatcacctggattgatgacagaagtaaagaaggcatagaggataaacttagcaccagtaccaaccacaacctcattacggttcactgcatagccataaaactctttcatatagtcgctaatggcatccttcaattctggaagtccagatgctaccgtataaaagctagcgcgaccatcctcgatcgatgcgactgctgcttcttgaatattttttggagtcgcaaagtcaggttgacccagggtcaaactcaagatatcacgaccttctgctgccaaagctttggcacgcgcatttgcagccaaggtcacactttcttccatttccaatacacgatttgataatttcatatttcctcctcaaatcttaaaaaacaccaatgactttcccagtcttgaaatccaccacataataagagctcccagccttgacttcccagatcggtttgcctttaaagcggccaaaagttacccgatcaatcgcgtcctgactctccttctttacaatcgcagttgcttttttttggctaatcccatcttctaaagaataagcataaactgtattatctgcctgatcaactaagacggccagtttttttccagcttgatcttttccaataaaggaagcataagctttttgtccatgaaagacggtttctgtgtcaaccgtcaccatcgaagagtgagaaaaggccgtttttctattctttaccaattgatcttgcaatcgatcagaagtcttctctacaagaaaaaggctagaaaagagtaccgtcatcgctaagatacagattcctattacatgttgccataccataaaatgattttttttctgtttcactccctcattatacaccaaagccacttataattctatagattttcaagaaagaattgttacgattattacactctctgtataatattatggtataaaataatttgataaataaagctaaatcaacactttgcacattctatgtcgatttattaataattttgtcataattttgtaattaatttgataataaaattaaatgacagaaatactatttattgataaaatataggtatggaaaatttaaagagattatttaaagaagcaaatgtagatttaaaaaccctgatcgtcttccacaaggcagaacgattgattcgtgcatctgaggcccatatctttaaaaagcatcagttgacaccgacccaattctctgtacttgaaaccttgtatagcaagggcgatcttcgcattcaagatttgattgacagcattcttgcgacctctggaaatatgactgtggttatccgaaatatggtccgagatggttggattacgcgcgaaacagatcctgaggaccgtcgtgcctatcttgtgtccatcacagatgcgggacgtcaaaaaattgaagaagcacttccagatcatatcaaaaatattcaacgcttgatgcaagtctttaacagtaatgaacaagctgaattgcaagaattgttgaagaaatttaaaaacattgcctaagccaattgctcaagacgattctgactccaaaatcctctattttggagttttcatcgtgcattctctttatctaacagatttaaaaaatattcctgacgcttctcaggaatatttttatttattctttcacaaagacccattctttctcttgcgataaatcctcacgataagagaaacctgctacttctaatgatttcaaatcttttagatgggtgatttcttccttcatcattgctgtcaccatggccccacgtgctttctttgaaatcgttgagtgaatctttagtgtcccaccacgattctccatgaatttgatccgaatcattcgctcacgaatagcttttgagaagacctgttcaaactcagaagacaagagagataagatctgctcctcaccttctactgcctgatcatagccctctttccagagtacctttagagattttccagctggttttagcttcatcataaaatctaagcgatggggagcaatcccttcataggcaggtagtacaccgtataaagcagtcgtgatcaacaaatgctcttgcagataagcctgctctttttcggataagtcttgacgctcgatactacggtacatgaggccatcaaacagttctaaagcaggataggtcttggcactcccagctaacagagcctcaattctttccttttctacttgggctctttcctctgagatcccgtaaaagctcgctaattcttctagcgagaattgcttcaaagcttggaggatggtttttgtgttctctgacaagggttggggctcgacgatacgagcctgttcgttcagttctttggcggatggaattaatagtttcataggtctattgtaccatatttttcaaattttcttgacaggagtttttattaatgttattatctagttattaaaactagattaaagaaaggtgaagatttagtgtccactttttcctatccaacgtgggagcaactgcctgagctagacctctatctcgatcaggtcctactttatgtcaataaaacctgtgcacctgttctctcttcttcagacaagggcttgacggctgccatgatcaacaattacgtgaaacatggctatgttgaaaaaccagataagaagaaataccagcgtagacaggtggctcgcttgattgctattacaaccttaaaaacggtcttttctattcaggagatcgcttctaccttaaacttcttgcaggaccaggcgagttcagatcttctctataatagctttgtcgcttatctcaatgagcaaaaagagccgatcgctcctatcattcgctctgcctgtcagacggttcaactttatcttgaaaccctgacttatattcaaccagtaaaaacggaggaagaaactgatgaattacaccatgaaactaagtaaaaaattatcctttggagaagagatcgctaatagtgtaacccatgctgttggcgccctcctcatgttgatcttgcttccgatctcagcagtctatagttttgagcaacacagtcttctcagtgcttttgggacttctatctttgtgatcagtctctttttgatgtttctgtcttcgaccgtctaccatgctatgtcttatgattcacctcaaaagtatgtgcttcgtattatcgaccattccatgatctacatcgcgatcgcaggtagttacacaccggttgtccttaccttgatgaacaactggatgggctacagcattattttgatccaatgggggaccaccatctttggtattctctataaaatttttgccaaaaaagtcaatgaaaagttcagtctcgctctttacttgatcatgggctggttggtcatctttattattccccaaatcgttagccaaaccaatccgatcttctggggtctcatgctcatgggcggcctgtgctacacggttggagctggcttttatgctaagaaaaaaccatacttccacatgatttggcacctcttcatccttgcagcttctgctcttcagtatttagccatcgtttactttatgtaatactgctaccactcttcagagtggtttttttgtgattttttctgtacaatagaaaaaaactgtatggggacagtcaggatgaagacaagcaaataccaagaaattattcatgttttaaaaaaggctattcaagatggtgaactagaaaccggacagaaaattccatctgttcgtcagttagcccgtcaattttcttgtagtaaggacacggtacaacgagccttgctggacttgacttaccagcatttcctatatgctaaacctcaaagtggctactatgttttggagcaggcacctgatcgacatgaggatcttccactaaaattagagaaagaccgcaaccaggctttcgaggacttcaggacttgtatcaatgaaaccttgattggacgggagaattatctcttcaacaacttttcggaccaagcaggcttactcgaagtacgccaatcgattcaaagcctattaaaggaggaagggatttatacaactgcggatcagattgttttgacagctggtactcagcaggcgcttaatatcctcagccagattgactttcccaataaaaaatctcagatcttgatcgagcaaccgacttatcatcggatgaaccaactcttagattcacagcaacttgcctaccggaccattcaacgaaacttaacgggaattgatctcgaggaacttgaaggaattttcaaaagtggccatatcaaattcttctacacgatccctcgttttcactatccgcttggtcatagctattcgaccaagcagaaagaagcgatcttgcaactagctgaccaatatgatgtctaccttgttgaggatgactatttgggagatcttgatagcagcaatgctccatcttttcattatttggatcaaaaggaccgagtcatctatatcaaatctttttcgaccaatctcttttctgctcttcgcatcacttccatgattcttccccaaaaccttctaaagccggtattaacctataagacgattctggactatgatagcaatctcatcatgcaaaaggccttgagtctctacattgataacggtatgtatctgaccaataaaaaacgacttctagccagaaaaaaagaggaggaagcaagtctaaagaccttgatgacccaatctcctcttctacctcatctgaccctgacccacgatgggatccttttagaacttggccaagttcaatcccttgctgccttaaaacacagtgggctcccgcttgatttctttgaagcagcctacatcacttcttgtccttatcaactcgctaagatcaaatcggcagatgcggccaatgttttaccaaaactgacgcctttttttgcaagagaaaccctcgtatagactatacgagggtctttcttatttcttcaaatgctcataaacaagtttggcattttgaaggccaatccgataatcgagacgaatcaggcgaatcgcttccatctctggttctttgaggtacttctctctctgttccttggaaatactacctggttttagaagatagtgggtgaattgatttctgactttattgagctcaacttgaagggtgaaatagagtacaaataagacaataacaactcccatcaggatcagatcgtttgacatggtgtatgctccctttttctgttcttttctttattttacagctttcaagcaagaaaaacaaggttaaatttgtatttagaccttatttgtccttatttcatcataccggcctggaggtcatacattttcttatacgttcctcctagagcaatgagttgatcgtgattgcccgattcgatgatttttcctttatcgagaacatagatacaatcggcatcttggatggtagaaaggcgatgggcaatggcaatggttgtccgcccttggcgcatcttcttcagagagttttggatcatctcttccgtctcttggtcgatattggcagtggcctcatccaaaatgaggatcttaggccgggcagcaatggtccgggcaaaagccagaagctgacgctgaccggtcgataaggtagacccccgctctgttaccggatgatcataaccaccaggtagactctcaataaagtctgccacatccacaaatgcagctacttgtcggacgtcctcatctgtcagttcttcatgatacattcggatattagaagcaatggttccatgatagaggaagggttcttgcaacactaaaccgatggacttgcgcaaggcttcctggctgtagtccttgatatcctgtccatcaatcaagatctggccacgatcaaattcataaaagcgcatgaagagattgataatagaggatttaccagaaccagtatgaccaacaaaagcgatggtttgtccgtttttgacctcaaaggagatctcttttaggacatcccgtttgccatcataagaaaaaaatacatgctcaaaacgaatatccccccgctcgatttcttttaggctaccagcttgcttgggctcatagtcatctcgatccatcatttcaaaagcacgccctgcagaaatggttgaggtctgcaaggttgcaaaattttgggtgacatcaatcaagggctggaaaagctggctaacatactggataaaggcatagataagaccagctgtaaagcctgaggactgccaatttaagccgaaaaaggtcagaatgaccgcataagccaggacctgtaacagggtcatagctggcctcaaaaagagggaattgacatctacagatcggttggcataatccaaatgctccccattaatccgttcgaattcatccgtcaagcgcttttcttgacgaaaagcctgcacgatccgcatgccttcgatcgattccgataatttcacattgatatctgataatttttgtcgggttatcttgaccaagcgattggataacttgcgatagagacgaatagaaaaccaaatgatgggaagaaaaggcaagatccaaatagtcaaatgccagtccaagctaaacatggttaccagggtgactagaaagagtaaaaaggatgaaaccaggcttgaaaagaccgtagaaaacatatctgcgactgcctgtgtatcattggtcacacgcgaaacaatcgaacctgctgctgtctggtcataaaaggacatacccagcctttgaagattttggaaaatatctagacggatatctcttacgatagaattggatacacgcgcaaaggttaactggctcaggtaagttgccagcacgcgcccaatgaataacccatagtagagaatcaaaaactgaaaagctgtcagtactggagagcctgcttctgttggatccactaggtggtcaatataccagcgagctgaaagagggatcgccgtcaataacagactagtcaggaaggtaaaggctaaggctaggcctgttaaccatttataacgccacatgtaagtcaagagccgcttcataacatgtgcttcagatgttttcattcagctttccctccatttcttctgataattgttgggctcggtaggtttcatagtaccaacctttttgagccattaattcctcgtgatttcctctctccttgatctgtccattctccattaccagaatcaaatccgcatgaacgatcgctgataggcgatgggctgtgatgatcgttgttttccccttgcgttcctgcttcatattttcaatgatttggtgctccgttttagcatctactgcagacagggaatcatccaagattaagatctcaggattcatgaccaaagcacggctcatggcaatccgttgcttttgcccgccagaaagagtaacccctctctctcccagcactgtctccatctggtctggcatggccagaatatcctcatagactccacaagttctcagagcctttatcacctcttcttctttgacctgtggatctgaaaaagcgacattctcgcgaatggtcatggcaaagaggatctgatcttgagggacatagccgatcaagcttcgaagatcttctaaacgatagtctttgatagagattccattgagcaagatatctccctgctccaagtcatgctctctaagcaagagacgcaacaaggtagtctttccagatccagttggccccacaatcccaagggtttgccctttttctaaatgaaaggcaagcttttcaaggacaggctctttctcataggcgaattctttaatgttatattccagatcgccattttgaatgactgtgactggttgactcggatcttggatatcaggtatttctgctaaaagtgtctcaatccgatcataggagacgctagcacgctgactaatattaaacaagaagcccatagcttgaaggggccagacgagcatattgagataggtaataaaggttacgatttgtccaaccgtcaggctcccttcctgaacaaatacccccccgaagtagagcgtcaagacataggagagaccgacaaaaagaagagtggtcggatcaaacaaagcattgtaagcggctgaagtcatattctttgaaaagaccatttgattagtcttttcaaaagcccgaatctcatctgcctgaaagccaaaggatttggtcaccttgactcctgatactgattcctgaacaaagttgttcagctctgagaatccttcttgggcctctttgaaggctttgtggtttttgcgcccaatggctgaagtcactaccaccataaccggtaggggcaaaatagctatgagggttaagcgccaatcaatcatgaaaaacatgctgactagggtcaccaaggctgtcacagaagcatctacagcagacataacaccgccaccagcaaacatagtcaccgcattgatatcattggtggcatgggccatgagatcccctgtgcgataacgctgataaaaagacggagacatgagcgtaaattgcttaaacaaacggtaacgcaagatccgagccaacttattggccgtcccaaaaatatagcgtctccaaataaaacgaaggccatacatggctagagctgcgaggaccaaaagggcaatatccataactaactgccccagtgtcagctttcttttatcgatcaaatcgatcacaaggcccatgattcttggaggaatgagatttaaaaagctaaccaagatcaaggaccctatcccgatcaagtatcgcttcttctctaaattaaaaaaccaagataatttcctcaacagaatcatcttatttccccttttttgtgagttgccaactactatccactagagcaaacaactcctcatcagcaattgttccatctaaggggatactcacccaatattttttattcatatgaaaagctggataaatccctttctgctggatgaaatgggctacttggtcagacttgacatttaagacttctattttcccagacttgccagcattcagttttttccaatcaatggtcataaagacaccataccacttaagggtgtctcggtgtcgaatagcaccggattccggagatctctcccacaaatactcaatcgttccctgatagtgcagggagatataggccatgagacgcttggcttgaggatagagaaattcttctacctcaaaacaagcttggcggattcttgcaagactttcatgacaggcttccctgacttgaccaacaaaatttccttgtagctgttcctgatggatctggatatactcgtcccctgtatcctgatcatagacctgaaaagaaatcttccggtcgcagacgcttacctttaagagaaaagtgtcggataagactgggcactggtatgcatagcctgcttctctcttttcaaatccataagccaatcccttttctggctgaaaggtgtagcggtcaaaataatgctctaaaaacattttctctcccttattcatttttgcactagaagaggctggaaacaacgtccccaaccttgataacggatcctcaaaactacttcaagcagtgatcgtttcttttttaaaacacgatgcgcgtgccatgcagttgacaaacgcccaattgctctaaaaagagctgacgattatcaagggtcacacccccacctggcaggatctgaatctttcccttagccgcatctaataaacgatgatagtgtgcaaaacgttgctctagtgtggcacctggacttccagctcgtgttaaaatacgggccacacctttatcagaaagccactcaatcgcttctagctgatctgtatgtgctaactcatcaaaggccatatgaaagacaacctctgcctctccacaggctgctagtaaaagctgcatgatcctctggtccaactttcgatcgctcgtcagcgctcccagcacaaaacaagtaacccctatttctttcgcagcacgaatatccgtcagcatagcttcgacttctggatcagtgtagacaaaatcgccaccacggggtcggataatgacacatagatccacagacttctctcttgtcagtttgattgcttcattgatcacacctatactcggtgtggtcccgcctactgccaggttgtcgcacagttcaatgcgacctgccccagcagcaatcgccttatcaataaaagttaaattttctgcacaaaattcaaagacaagcatgacaactccattttcaaagacttaaaacaaggatatactaacagttaccttagcattgccattttctactctcgcttttgagatactatagcctgcttgaggaatctcaagagtgatttgatcaccattcactgtaaagccgcctccattttgattggatttatccttcaaatagttgagaaccaaaaattttggaatgggcattttccccaatttagcaccagtcacggtcaatttcatgacattgttttcgacttgaccggtcatggttaaatctagatagctatcgactggccctaatgatacaggtactttgacatgaaggtcattgccatccattcctagtgccatcttttgatagtctgaattctcaagggcagaaccagcacttgtttttacgacctgactcaattgcacagaattgagactcagctcagttgagagtccttcagtgctcacagaggcgtttgaaactgcattttgagccagttcaatcaaagaactccctgcctgcacatttctcagctgctccccttcaggaatagatccaggaaccaacaagatcactaataacataaataaaacgatcaccatgccaatcaggcgtctcatccacttaaacatctgctcctccaatacgtgaaaagttgtattcttattgtaccctaaatctaaagaaattgcgactaagaggagcctttacaaagaaaaagagaccgaggaaacctcgcatctctctgtgcattatttcgatttaatgtagttaacaccatctgctttaggcgcaactgcttgtccgaagaaggctgccaagacaaccatggtcaagacgtaaggcgcaatttgcaagtagatggatgggatacctttaagcaaaggcaattgattcccgataacagccaaactttgtgaagctccaaagaagagactagccagcatggcaccgattgggttccatttcccgaaaatcatggccgcaagggcgataaatccaggacctacaatagtagttaccgcaaagttaacagaaactgactgagcgtaaatagctcctccgatacctgctagggcacctgagatcatcactcctaagtagcgcattctatatacattgattcccaatgtatctgctgcttgtgggtgttcaccaactgaacgaagacgcaatccaaatttcgtcttgaacatgataaaccaagcaaagaatgaaaagagaatcgcaacccaaccaatgatgctggcattgttgaagaagatatctccaatcaccggaattttagataagaccggaatggatgttttcccgaaggcaactttgatattatcagtttgtcccttgttgtacatcgctttaacaaggaagaccgcaagtggaggtgccatcaagttcaatactgtacctgagacgatatggtcagcacgaaaatgaatggttgccaccgcgtggatcaaggagaagagtactccaatccctgcagcaacgatcaaggacaaccatggtgtcaaattccctaacgtaggctcaaaagtcaagttaaagataatacctgagaaggctcccataaccatgattccttccagaccaacgttaacaaccccagcgtgttctgagtatgctcctccgatacttgtgaagatcagcggcgccgcatacacaatcatagaggaaacaagaatacttaaaatcgttacaatactcattagtttgctcctccttttttagctgaacgcatcgagatcatcttttcgataatgtagtgagcacatacgaagaagataatagatgctgtcacaatttgaacgacttcttcagggattgcagctggcttcataccaactcccccaatttgaagtgctccaaacaagaaggcagcaaatggaataccaattggtgaattcatcgcaagaagggctacggccattccgttaaatccaacactcatcgagctggtttgaacgtaaacatttgagtaaatccccagaccttctactaccccaccgataccagcaagagcaccagaaatgatcatagaaaggataatggtccgttttgcagacatccctgcatattccgctgcattcgcattgagaccaacagcacggatttcaaaaccaagtgttgttttcttcatcaagaaccagatgaccaccaatgcgatgatggcaaagaagatcccgatgttcatttgtgatttgtccgtcaaattacgcaaccactccgtctggtagacagcgttggctcccacatcaatggttgagtccttgttttccatcaaggaagctgggaagctatgaatcaaggcattcccaccatagagaacaatgtagttcatcataatggtgatgatgacctcactggttccgagataggcacgaaggaaaccaggaatcgctccaataaatccacctgcgatagccgcaatcaaaacggtcatcggaatcattagtaaacgaggcatatttgggaaggacagggcaaaccaagtcgccatgatccatcctgcaaaagcttgacctggaagtccaacattaaagaagccggcccggctggctactgaaaatccaagagcaactaaaatcagtggccccatggcacgggaaatatttccccaactcttaatcgaaccaaaggctttcttaaacagcaattcatatccccaaaggggatcatagctgaaggcccacataataatggcacccaagaccaatcctaaaaggacagacaccaatggaacggcaatttgttttaaattcttattcatttgatgctccctcctttacttttcctcctgccatgaggattccaagttcttgcttattcgttgtttcaggggttacgatcccttggatcttcccatcatgaataaccgcaatacggtcagaaacattcaaaatttcatctaattcaaagctgacaaccagaacggctttcccattatcccgttcttggatcaagcgtttgtgtatatattcgatcgctccaacgtccaatccacgagttggctggctgacgatcaaaagatctggatcgcgatcgatttcgcgagcgataatggctttttgctggttccctccagagagagccttagctggtaccacttcactagcagcacgaacgtcaaactcttccatcaacttcttagcataagaggtaatatttggataattcaagataccattcttgctaagaggttctttatagtaagtttgaagggcaatgttttcagagatcatcatatcaaggactaatccatcccgatgacggtcttcagggacgtgccccaccttcatttctgtgatttgacgtggacgaagtcctacaacgtctttgcctttaatcttgattgaaccggattttaccttccgcagacctgtaatcgcttggatcaactcagactgaccatttccgtcaatccctgcaatcccgacgacttcaccagcacgaagttccagtgacaaattcttaacagctgggactccccggttttcgtttacaaccaagttttcgatcgacaagacgacttctttcggttgagaaggacctttctccgttttaaaggaaactgaacgaccgaccatcatttcggccaagtcttggttggtagctccaccaatctcgactgtctcaatcgatttaccacgacggataactgtgacgcggtctgaaacagcacggatttcatccaacttgtgcgtaatcaagataatagattttccttcattcgccaagttcttcatgattgtcatcaattcttcgatttcagctggtgtcaacaccgcagttggttcatcgaagattaggatgtcggctccacgataaagcgtctttaagatttccacacgttgctgcgcaccaacggaaatatcctcaactttggcatttggatctactgccaagccatattttttagacaactcaaggatatcttgactggcttttttaaggtccaaaacaccatgtttagtggtttcagaaccaaggatgatattttcagcaacagtgaaagcttcaaccaacataaaatgttggtgcaccattccaattcctaaagaggctgcttttgaaggtgagtctaggttaacagtttttccatttaccacgatgtctccgcttgttggttccaataaaccagccagcatattcatcagtgtagatttccctgcaccattttctccaagaagtgcatggatttcacctttgcgcaactgaagattaatcttatcatttgctacaaagtcaccaaattttttggtaatctcacgcatttcgatgacatattcatgtgtcatggggtgtttcctttcaaaatttttttatttcaataaaatctgctaggtgactaacagattttattgagacaaaaatgtctcactttaaaagaaacggcccttaaagggagggccgctccaatcaaatattatttttcaggaactttaagagacccatcaaggattttagctttggcatcttcgacagcttttttagcatctgcagaaaggttgtcggttgtcaaatcaactccaccatctttcaagctataagtaatcactttaccgccagggaatttaccgtcagcagctttcttagctaagtcttttacagattctccgactttcttcaagcttgaagccaatacgaagttagattttttgccatctttagaagtatattcaccttcagctttttggtcacggtcaacaccaagaacccaaactttttcgtcttcatttttcttctcgttcaagtctttagcttcagagaagacacctgcaccagtaccaccagctacttggtagataacgtctgcacctgcagcgtattgtgcagcggcaattgtcttacctttagcagagtcaccgaatgaaccagcgtagtctacttgaaccttgatagatgggtcaacagatttaacaccagcttcaaatccagcgcggaaacgagtgataacttcactttccataccacctacaaaaccaacttgtttagtttttgtagttttcgcagcagcgataccagcaaggtaaccagcttcgttatcggcataaacagcagatgctacgttcttttgtccttcaatacggtcatcgatgatgacatagttcacatcttcgttgtcttttgcagcttttttaatagagtcgctcaaggcaaaaccaacaccaaagatcaatttgtagtcgttagaaacagcttcatcaaggtttgtcgcatattgagattgatctgttgattggaagtagtcaaatccgttccctttagaaagaccgttttctttaccccaagcttgcaaaccttcccaagcagattggttgaatgatttgtcatccacaccaccagtatcggtaacgatagcaactttcaaatctgttttagattctgagtttgcgctatcttttttagacgcacgatttccacatgctgcaagtccgatagcagcgacagttactagaccaaggcctagccattgtttcttgttcattactgaacctcctaaattattgtgcaacattgttgcgaagtattgaaagggtcaaaagaccgccccacagacccattaagtcaggtctgtaaaggaatatggaagtaattccttgaccgtcatcacgaccgtcgatttatctttagataccaaggttacaggaaggtctggctcaaaaaattcagccatgacctggcgacaagcaccacatggagagatgggcttttctgtttgcccatagataatgagctcttgaaagtcacgagctccttcagaaacagctttaaaaatggctgtccgttctccacagttggttaatccaaaactggcattttcgatattgacacctgtatagatttctccatccttcgttagcagtacagctccaattgggaaatgagagtaaggcacataggcttgattactcacttcaactgctaagttgatcaactcagtagtcgccatgagccacctttccttccatgatggctacaccagaagaagtcccgatacgggtcgcacctgcttcgataaaagcaagagcatcttcataagagcgagcaccaccagaagccttaacacccatgtcgggtccaacagtttgacgcattaaggccacatcttctaccgttgctcctccagtagagaagccagttgaagtcttcacaaagtctgccccagcctctttagcaatttggcaagcaacgaccttttcatcgtctgttaagagacaagtctcaataatgactttgacaagcttatccccgctcgcttcgactaccgcttggatatcttcctcaactagtgctaaattcttagacttaagtgctccgatattaatgaccatgtcaatttcatcggcaccattttgaatagcattttttgtttcacacgctttgacaaatggtgtatttgctcccaaaggaaaaccaataacggtacaaactttaacgtctgaatcgcacaagccctcagccgcaaaattcacccatgtcgggttcacacagacactcgcaaaaccataagccttggcttcttctatcagcttttcgatctgttcttgttgcgcgtctggttttaaaaaagtgtgatcgatatatttatttaacttcatataatctcctgagttgcttaagatattatttcaataatttctttaacgctttcagccctttctagtattttaacattttttttgaattctgtaactctttcttgtgaatttttttcattcatgaaaatacgggcaatgcgttccccttttttgacgtgctcaccaacttttttgtcaaacacaattcctgtttcgtaatcgaggggatctgatttgacagcacgaccagcacccaggcgcatggcaaacaaaccaaactccatggcaggtaaagcagcaatgacgccatcttggtccgctgttacttcaaggacctgatccactttaacgggacgatgcaaatcttctaagtctccaccttgagccaccaccatttcttcaaacttcgctaaagcttgaccattggtcaagtgttcatggatggcttcaatcgattgttctacattggccaatttcaacatgatttgcgctaattcacaaataaactctgtcacatcagcacgcccctgtccttttagaatatccagggcttccaaaatctctaaacgattaccaatgctggttcccaaaggttggctcatatctgtaatgacagcgatggttttccgacccactgcatttccaagatccaccatggtacgggctaagcgacgagcatcctcaatattcttcataaaggcaccctcgcctactgtcacgtccaaaagaatagcatcagcaccagcagcaattttcttactcataacggagctagcaattaaaggaatggtgtccactgtcgttgtcacatcacgcagagcatacaagagtttgtctgcttttacgagttggtcggattgcccaatgaccgataagccaatctcctgcacctgctggataaattcctcttgggtccgttcaatctggaagcctttaatggattccaacttatcaatagttccacccgtgtggcctaagccacgaccgctcattttagcaaccggcactccgaaacttgcaaccaaaggcaccaagaccaaggtcaccttgtctccgacaccaccagtcgaatgtttgtctaccttgattcctggaatagctgacaaatcaaactgttgccccgtttggaccatcttcatggtcatatgagagatttcttccgtcgtcatccctttaaaataaacagccatagcaaaagcagacatttggtaatctggaaccgttccagccacatatccctcaatcagccattcaatttcttccttgtttaaggcaagaccatctctttttttctgaatgatatctactgctctcatgattctttctcacttcttaaaatataatagcctttgtctttttttactgtctcacaattgccaaacgtctcttccatcttggccttagcgctcggagctccttgttttttctgaatgacaatggtcaagtctccacctggtttcaaatgctcaaaactaccagtgatcacttggtgaaccactttcttaccagctcggatcggtggattactgatcacatggtcaaagaccccttctactgcttcatagacatctgaagaaaagatctgagcttccacgccgtttcggctagcattttttttagccaagtccagtgcccgctcattaacatcgaccatggtcacggtaactccctgggctttagctagagagaggccgatcggtccatagccacagccaacatcaaggacactttctccttcttgaaaatccagggttgataagagcacctggcttccatagtcaatcatttttttactaaagacgccggcgtctgtatagaaattcatcttttgccccaataaaacaacagccagatcatgaatatcatgggctgcatctgggtttacatcgaaatacattttactcataaggttattctatcataattcattccttttttaaatcgtttacatgacctctaaaaattggtatactaaagactacaataggagtgacatatggacaaagaatttctacattttgaaaaaattaatcgggaaacgtggcaaaatttgcaccgcaaaaccaccccacctctctcgcaaacagagctcaattctattaaaagttttaacgaccgcatcaacctccaggatgtacgtgacgtctacctgcctttgacaaacctgattggaatctacaagcgttccaaagaagatttggccttctcaaaaggtatttttcttcaaaaaacgagtgaacgccaaccctttatcattggggtttcagggagcgttgctgttgggaaatcgaccaccagccgtcttctacagattctgctttcgcggaccttcgaaggctcgagcgtggaattggtaacaacggatggctttctttatcccaacgctgtcttaaaagaacaggagcttctcaatcgaaagggatttccagaaagttatgatatggaattactccttcattttcttaaccaaatcaagaataataaaagcgtagagattccagtctattcccacgagatttatgacattgttcccgatcaaaagcaaacgatattgccagctgactttgtcattgtagaagggattaatgtgttccaaaatcctcaaaacgacagtctttatatgaccgatttctttgatttttcaatctatgtggatgccgcggtcgacgatatcgaatcttggtatatcgatcgcttccaaaaactccttgcattagctcagaatgatcccaataactactactatcgatttacagagcaacccctagaagaagttttaaacatggcccatcaggtctgggaatccattaatttagtcaacttgcaacattacatccaaccaaccagaaaccgagctgatctgattctccataaggcaaccaaccatgaaatcgacgaaatttatctcaaacgctagagaaaatggcctgttaacggtacttttttaaggaaaagctattttaggcttgtcaaatcttaacttttcatatataatgagatagttagattatcaatggaggtgaataacttggcaaacattaaatcagctatcaaacgcgctgaattgaacgttaaacaaaacgaaaaaaactcagctcaaaaatcagctatgcgtactgcaatcaaagcttttgaagcaaacccatctgaagaactttaccgcgctgctagctcagctatcgataaagcagaaactaaaggtttgatccacaagaataaagctagccgtgataaagcacgtcttgcagcgaaacttggttaatcaagaacagcataaaaatcaagctctccggagctttttttgtgcctaattttttgagaggtgcttatgaaaattgttattatcggctattctggatcaggtaaatccaccttggctgaaaacttatcccgccactactccattcccaagctccatatggacacccttcaatttcaaccgggttggatagacagtgatcgggattggatggagaaagagatgagacagtttctcagcgatcatagagactgggtcattgatggcaattactcttggtgctactatgaggagagaatggagcaagccgaccagattatctttctcaacttctctcgttggaactgcctctttagagcctggaaacgataccgccgttataaaggccgagtccgtgagagtatggcggcaggttgccccgaacgctttgactgggaattcatccgttggatcctttgggacggtcgccaagccagacaggtcacacgctatcggactgtcaaccaaacctatccagacaaatttatctctctcaaaaatcaaaaagagctggatgcatttctaaaaaacatacaataaaaaggttgggatatctatcccaaccttttttatttatcaacgtaatcgccaccggtgaagccatagtattcttccagactcaaacctgagtcagcgatatcttgcgcttcttttccgatatagcggagatgccagctctctggcatgtagcctgttactttttcttttccttcttggtaacgaaccacaaagccatatttagcagcattcttgagcaaccacttacttggtccaggttcggttaccaaattaccactggtatcgatcagatcaaaggtcaaacctgtctggtgttcactataacccggtcttgcagaataacgatctgcggcctcctgaccatcttgattgacatagttttggtagaggccaacttgggtgtcgtagctacgaaaaccactatattggtcactgatcggataaccttctgcctgcatggctgcgatcaattcatgaagggctgaaacagcttcaggatcttcacctgggttaaagtcaggcgacaagggataatgtttgttggcgatcatgacctcaccatacttccctttgacactatagtaggaaccattatagctgacaccagaatccactttcacatctgacttaccagcttttgaagactcttctttgccagtctcttttgacgtatcctttgcagaagacctttctttggaagacttggtttgcgtttgtttgctttcttcttttgcagaagattttgaactagtagattgagattgggagcaagctgtcagggttaacaaggcaactgtcaccaaagttaatttggaaaatcttgctttcatgaggaatctcctatgattcttttgttacgacaatatccgtaatcacataacttgcacctacttttttcaaggtgtaggtcttgtacttgcggttttgtgaatctggatgactatctgtataatgcacggtaaagtcttcataagtcttaatcgtcaccacaccattttcttccgtgacactttgaatgtccaaagctcctggagtatagtagtcaatttttgcctttcgaacaccatcaccagttgtgaattcaaccatgtccttgtaggcttgactttgtgtgtcatagtatttagagtaggtgttgtttcgatttgaaactgagctaaagacagcgtcgcggtactctttcaagaattcttccgccaaagtccgattttgttcctctttggctgcttgcgatttcttagcatcttgcgcactcttgatgcgtttcagggtatctttggctagtttaagttcgatcggatcgttctcaccctcttcaatcgtcactttagccttctcagttgtataggtttccccattcatgttgaagacagcatgtacttcaatttcttgataagggatgctatctacttcaaaggtcgtgctggttccgacttcttttccgttaaccacaaccttcacatccgttgggttttcaacttcatctgggaactcaacttctaaattgcgtttttcagaattcaactgcaattctaagttattcttggttgcttttttaggattgagatggatcttagaagtaacatttccgacctctgttttagcagtcaattccatttcttttgtattgtaatggaaagaaccaaggtctgtcactgcatctttcttcaaggtcaccgttttattggcagccactttaagtttggcttgatccaaattagtcttgaccttcacttgcactggatagctggccacacggtattcttggaagattccaaatttcttgtccgctttttccaaaccaaagatcttgtttccagatttatccgtatagctgccttctccaccattatcaatgatcttgttcaactctgtgccgatatcgaccccttgatcttccatgctagtgataaagctttcagcttcatccttcgtccatttatcgttatcggttgaaagtaggtctgctgcttcgcgataatccttggtgtccactgccttaataaatttatctgctgtcacttcgacacgtgttgtagactggaagtaaaagaaggctgctaccaaagcgatcacaaggactgcgatagcaaaaataattccaattttcttcttggaaagtttctttccacccttcgttttaggggccttttgttttttctgagctggacctgcttctgtgacatttggaccagcaaagacctgcgtttgctcagcagcaagtggagtcgtatactcttgagtcggctgttgagggacatattcctgtgtttcttctgttgcatctggggtcgcaaattctgattcaggcacaggtcctacaaaaaactcaaagttttgacttttagccacggtaaattcttctgcacttggcttgcgcccataggtttcttcaaaatgttgcaaccaagcctgacgagctcctagaagtggatcgacattcttcacttcttcaactggttcaaccactggttcctcaacaggagcgacttcctctgctggggcatttcctgcgatagactgaatttgtttcaaatcaaatccacaagctttcccagccataaactcttccggtgacggtttgcgaccgatcactttttcaaataattcaacccatttcttttgcatggatctcttctccctcattataaaatagggaaagtgggtattcccaccttcctttttgtgatattgttagaatccaaagttagagaaatttggagcacttggaataaatcctacggctacttgttctaaaatacgagcattcacataaatgacaaagatggcaatgagaagcaagacaacagatgatgctactagaagcaagaacttatctgctttaaagcttgtcttgttcaatccttgatgaacgacgtagcatgttccaacaaagaacaagaagaaaataaggaagtttacaaagccataaaattcataaacttttacaagacctactaagaaagcaaggagggcaagtggcaatgtgtaaacagacaaacgtccaaactcttcaaatgaacgaccgtaactgtattccttatcttgaagaaccacacgacgaacaaagaatccagctacttggaaggcgtaaacgctaaagaatagggaaatcaatgtcaacataaaggcacggaaatccattccataaccgcctgtaaatccactagctgtgaagaaagttgatagggtcaagacaaaggcagttaagacatactgtaaaattccgttaagagcttttggattttctacagcagttggacgtttcaaagccgaaaggaaccaattccagtaaccaccaacggctacaccaaattgacttggttggccaggataaggttgtcctggttgaccttggtaaggagcttgttgataagctgcttgagtaggttgttggtaggcttgctgtggagcttgaggggcaggctcttgaactggagctgcgactggttcttctgtaggagcagttggcgctgctggtgctgcaacaaactctggggcttgtggagcagcaactggttcttccacaggtgcagttggtgctgcgacaaactctggggcttgtggggtttctggaaccactacttcttcttgaaattctcctgcagccagtgcttgagctatttcttctgcactagcagaacgaccatttacggcttcgaaataatccagccaatcttgttttgacatatttaatctccttaactattgtttatactagggtattatacaaaatttctgaaccattttcaatgaaagactggaaaatccctgtaatatcttttgaaaaacatacaaattctactcatatttagaaattagtaaagaaagtggctgggacaaaagtcctagcctctcaattatttttggattgtcgagcaagacgcagtggttgagtgggctctactacgctgatttcatcagcttttacagccctactcaactgtgcggaggtgggacgacgaaatcgaattctaatgaattaccgatttctgtcccactctctcttaggattcaaatgcatccatgccaccttggacattggtcacatcatagccttgctcttccaaaaattggcaagcacgcgctgagcgtcgaccagacttgcagatgacataatagggatgatccttctctaattcctggtagcgatctgctaactcagataagggaagaagacgaaccccatctaagtgaagggcatcatattcctcctgctcgcgtacatcaagaacgtgtaagtctcctttttgataagcttggtaaaagcttgaaaatggaatttctttcatgatttctcctttgttatggaagggttagaatttcataatgaaagcaaatagcctctaaaaatcggaacaagtcttgggttttaataaagatggtcttttcattggtattgggatgaaaggtcatgatctcctctgacacaatgtctttatcgaaatagacacgaatatctttttcttcattgttcaataaaccaaatggagaaaccgtacctggcggtaattgcattttttcagctaaagaatctgctgaagccatgcggatccgattagcccctacttgttctttgaagtcatccatatccaatggtttctggtcatccatgatgagcaaatagtattgagttttctttttattggtcaaaaacatggtcttggtccggacaccttctaagccttcaatataagaatccgcctgctccgtcgtaaatgcaggtgggtgttccaccacatcaaatgaaattcccaactcgtctaatttttctttaacttgttgataaggatccatcgtcgcgctcctttatttttgaatgatctgttgtactaaggtttgcaattctggcacgacctctgcctcaaaccaaggatttttagccatccagatttgattgcgaggggaagggtgaacaagtggaaaataggttggcaaatagtctttaaaatggtggacccgttcggttactttgccactaaccttttcatgaaggtaataagcttgagcatattgtccaattaagagggttaactcaatatccggacactccttgagaagttgagggtgccacttttccgcaaagcctttgcgaggtggaaggtcaccagatttcccatgccctgggaaataaaagtccatgggaatgaccgcaaacaaaccagaattataaaaggtgtcttcgtcaactcctaaccattcgcgcagacgatcaccactcttgtccttccagtaaataccagcttcttccgtcttcatccctggagcttgtccgatgatattgatacgagctgtctttggggctgcaaagagtggctctatccctttctctgtatattctttattttgaggatctgccataatggcttgtttaatgctttcaatccttgacataagtcctccttctatggaaaaactcagccagaaaaactggccgagtagtggattatttgattagttcatagatagcttctgcgtaaatagcagctgcacgatagagatcttcgacatctgcgaactcattagcttggtgcatagtattgacatagtctgggaacatagcaccaaaggcaactccacgtttcaagagacgaccaaaggtaccaccaccgatcacttgttcgtgtcctttgaggccagtttgtttttcgtaaacacgcaagagagtggataccaattcgtcatccatcggaacatagtgaggtgtgtgaccatgggcggacaagcttactgtagccactccttcgatcttttcaagggtggacttgatggtttcaggatctgtaccttgagggtaccggatattgagggcaatggtgttgtctgcttggctttcatcaaaatggaagacacctgcattcatgctcaatggtcccattttggcatctgtatgggcaattcctaatttttcacctgcaaaatcttcgtgaagaagtgaagctgtcacatgaaggtaagccttagcagcaccaccaaaatcaaattggttcaacaagagagccaagtaggtcgcaccattaattccatcttcaggagttgatccatgagcagattttccaacaatcgtaacggtataggtttcttcatcaacagttgagatttcatactgaagctggtgttccttggccaaggcgtctaagaggccagcaagatctggtagttgtccagaaacgactgcagtcgctgactctggtaccatgttttcacgaaggccgcctgtaaagctatgaagatgggcacttcctgtgttgtcatttccaaaatgaaggtactcagtgatgtttcctttttccccattgatgattgggaattccgcatctggtgagaagccaaaatctggctcaggaagtccgacgtgtttgaaatagtaatccatatcgccccagcctgattcttcatccgtaccgacaacaaagcgcacgcgcttagaaacagggagtcctaggtctttgatgatcttcaaaccatagtagcaggccattgtaggccctttatcatcagacgaaccacgcgcatagagcttgccatcaataatttctggtttatatggatccgttttccagccactacctgcaggcacgacgtccatatgggcaaagatcccaagctcttcttctccttcaccaaaagtaaagtgaccggcataattgtcgacattcttggtttcatagccatcacgtttggcaatttccaagaatttttcaagagcttttacaggaccaggtccaaaaggatgctctgcatctgccttgctgtcatcgcgttcagaattgatttccaagaggctgtataagtcagccatcatctcatcgcgacgtttttctacttctgctttaaagtcaactgttgtcatgaattcctcctcgatcttctacttgctaattggcttagcgtttgtcaatgatttcgtccactggtaagcgatagcttggctctactttttcagccgcatagccaaccgtaatcaaaacttctggacggaaacgctcttcgatgtccaatacttcattgatttttgatttatcaaatctcaagataatattggttccaatgccttggtccgtcaaagcaagtaccaagttcatagccacaagcccggcattcaaagccaagtaatcacttgtttgttgggcatcatagcgtgcaaattcagcaggaagattttgcataaagtattgcaactgctcgtctgtgaagtttttcaccccaccgacacgtgcaatcttgcgagcccgtttttgcaaatcagtatctgtaaagagggcgatggtcacaggtgcttccatgacttgatcgtagtttgcaccataggctaattttgccaattccgcatttttttgacgaacgaccacaaatttccaaggctggctattgtgggcactaggggccaaggttgcgatctcaatggcagttcgtacatcctttggatcgaccggttggtcagtgaaatgcttgatcgcatggcgttttttattgagctctagaaatttcataagcttcttccttttctatttctgttacctctattctaacacaaaatgaaagagcttgcagggttttacagcctaagattgtgaaaaaagaagcggacattttgaagatccgcttcttttttataggttgaatacacaagaggtcaacctatgattcattggaaagattgaaataggcagctacttctttggcataaccgtatttctcaattaagccagttagcagatcgatgttatgaccccgatagttatcctcgcatctcaattcttcgtacatctcaataaaaggaaggcccttgtccttagcatcttggagctctgcttcatagtcataggccacctttcgaaattgcaggttggtcaccccatctgcttcgacatcgatcagagcatactgggccctgtggttttgaattggttcccagtcgaaataaggcatgccaatagttcccggattgaggatctgctggccctggctgccatagcgaagcaactgcttatggacatgaccgtagatcgccatatccgtctgatcatccagcagttggtcaaagttctccgtcgcatttgctggacgcaagtctccaccgtaattcttttctggcaagttgtgggtcagtgaaaaacgaatgccattgacctccttcttctctaccaatggaagcgaacgaagccaatcgatccgcttaggatctagtccttccatgaggtactgagtgaggcgaagaagttggatctcctgcggatcctcaagtccgtactcgccatccaaggcctctaggacacaatcgtcccaatttccacgaacagccgctgtaatcggaatcgcatctagcaactcaaaaaggtcctctcttccaggccccggaagcaaaatgtcccctaaaagccagtattccgtcgcgcctagagcacgcgcatccgcaatcactgcctccagggctcttgtatctccgtgaatatcagataatatagcgattctattgttcattataaactccttatgattggtatggttcagaatcctccgccacttccaccaagggacttgcttcttcttgctttccttgatggagcttggcttgcactgcctccgcgactgcccgtgggatgccgactgtgacgatctcatctacagtagcttccttgatcttggtcagcgacttgaagtgcttcatcagcaactgctttcgttttggtcccaagccttcgatgccgtccagctgagaagagaaggaatttttagaacgaagttggcggtggaaggtgatggcaaaacggtggacttcatcttggatccgttggaggaggaaaaattcctgtgaggtgcgcgaaagttcaatgatttggagaggatcgccaaagagcaattcatgggtctggtgcttgtcattcttttgtaggcctgcaatgggaatatccagccctaactcttcttgaatgacttgcttagcgatattaacctggccctgaccaccatcgataacgatcagatcaggtggcgtcaggccatcccgcatgacacggctgtagcgtctgcgaatgacctcccgcatgctggcatagtcatctggtccgacaacggtcttgatcttgtacttgcggtagtcctttttgcttggcttcccattgacaaagaccaccatggctgaaactggactggtccccatgatgttggagttgtcaaaggactcaatgcgcacaggagttggaatttgcaggagttttccaagattttcaatggcaccttgggtcttttccatggatttttcaagaagattgaacttctgctccagactgacacgcgcattcttgatggccagattgaccaactgcttcttctccccacgctggggcttaaggaccttggtatccactagtgccttgaccgcttcttcatcaatatcttgagggatcaggatttcattggggatcaggtgggatttctcctggtaaaactgccccacataggtcaagaaatcctcgtccggatcattgtagtaagggaaaagattgacgtcgcgctcgatcagcttgccctgacggacaaagaagacctgcacacacatccaacccttgtccacgtagtagccaaagacatcccggttctgcaaatccttggccatgacccgctgtttggtccgcagggtcccaatagcctggatcagatcccggtactctgccgcccgctcgaattccatgttttgcgcagcggtattcatcttgagcttgagctcatcgataatcttgtcatcctgccctttgaggaaatcagaaacctcctgggccatgcccttaaaataagcctcgtccttgtggcagactgtgtgggccatacattgccctaaatggtagtaaaagcagaccttggaaggtggattggtacacttgcggaatgggaaaatccgatccaaaagccgcttgatctcattggctgctcctacgtctggatagggaccaaaatagaggccaccatcctttttgacctggcgcgtgatgatgagacgcggatagcgctcattggaaatcttgatgaagggataggatttatcatccttgagcatgatattgtacttgggcttattctccttgatgaggttgatctcaagaagtaaggcctcaatattggactcggtaacgataaactcaaaatccacaatctcagataccaacgcttcggtcttggtatcgtggctccctctgaaataggaccgcacccgattgcgaagatttttggccttccccacatagatgatggttccgttcttgtctttgtgaatgtaacagcccggactcgtcggcaagagctcgagcttggatttaatcaagttattcatactctctattataacaaaaaagggaggggttagcctctctctagtatgtttgtattattgttatccaccttcatcaagtaaaaaataattattaaatagtatatcagaccctcatcctcaatccttcatcttcacttgccctttttcatagcaaaaaagaggggtctcaaaggatgcccctttactagcaatcgataaactttatactttgagattagccatctggaagatcggaatcacataaggaacaatagacatcaggatagtgaataacacgaagaaccagaaccagaaggaagcgagggcacgctggaaaactcccggttgaggtttattgacctgaatataagccttgatagctggccatttagtcgcaagaaccactatcatgacaatggaaccagtggctaaaacaccgatttggagccaatttgctagtccctcgtccacatgataggccacataatgcaagccttgggaaatgacaaagttattgaaaatgtgatagaaaatcgcccaccagatattgtattcaaaggcaatgtagccgaatcctagaccaatgatacttgcgaaaaagagctggtcaaaattggcatggaagagtccaaataagatagccgtcataacaatggcaaagattttcccgtagcgctccaagcctcgcaagcctgccccacggaagaagaattcctctgtgataggaccaaaaaagccagcatacaagagcatggtccaagatcgctcaatcgtatctccaagatctggtgtcggagagtaaaggccaatggtctcaaacatgcgctcaatcacttgtgtcatcacagatgaaaaaacttgagaaaagccaagaaaggcgagaagaataaagaagactgaaagagtcatcttacgtcccttgtgcttaagatcatatttatagagggccttcttgcgataggcattaaaaagaaagagtccaatggaaatagagatgaggtagggaataccagcccaaacattcagggcattaagtttctccgttacttgacttggatcttttctgagagagcctgctatggtcaatccaagaaggacctcccacaggacggttaccaaggtcattaccaagagataaatggcaagtgttccggaataccttcctatatcttttttagggtctaataatcggttgtattggttcatttcttcctcctagaaaatagataaaaactcgcacacattccttcgtataagacaaagaaaatcaaaaaggcatgcataaagtagtcttctggtaatgcaagaataatcgaatccacgcgcggatcaaagagccaagtattgtccccagcaaataagacctgatgaaagagcgtaaagaattgatcaaagccaatcataacagccatcactgcaagtactactggtaaaaccatcatccaaaagaagagactacggtacaaggccaggtagccttttttgacgactgtccgcataaactggataaaaccaggtagtgtgaccacgaaaacgaccgtcactaagtgaaataggtacttgacggtctcaaaatggtgcagtccattttttgaagacggaaattgaggcatcttcaacacccattgaaaaggattggtcaagtagttcatcaagacattaaaattcttcatgatgacagaagccgaaaaaccagttcggccctggattcccaaccaatgaatctccatgggatagaggacccatgctaggccaatggtgagaaggatggcagcggacaagataaagaaaattaggtttatggatctcaaacttttaagcatcaaaatcccactccgctaaactggcaacaacatgtgtcggtgcgattggtaaggtcggcacttcttctggtttggtaaaacctgtcgttaccaaaagggttggaatcccattgtcaatacctgcacgaatatctgttaaataattgtccccaaccatgaccacttcttctcttgcaagccccaagtgttcaatggccttgtccatgatgatggcctttggtttgccaatgatcactggcttaactcgtgtcgcagcttcaacaagggcaatcagagatcctgctcctggcatcaagccacgctccgttgggatattaaggtccggattggtcccgataaagtgtgctcccttttgaattcccaaggtcgcaatagcaaatttctcataatccacttgccaatcgaggccaatcaccacataatcaggtgcttcttcatcgatgatatagccagcttcttcaatagcatctttgagccccgcttctccgatcacatagacctttttgcccaagttttggtcattcatgtagtcaatggtcgcaagagtagctgtgtagatagtcgacacaggggtttcaatattgaagtgagtcgccagcatatcccgaacagtctctggtgtacgggtagtgttattagtgacaaagagatatggaatctcacgcgcctgtaattcatgaacaaaagcttctcctgcaggaattcgtgattttcctttgtaaatggtgccatccaaatcaattaaatagcccttgtagtgcatttatttttccctttctgtatcagctttttcatgcaacttctctgcatcgactcgtcccccagaaccatataagagcaaggctccagcatagaggacaaattgtaaaatcaaccctgtaaaattgattccttgacttcctgattgagtaaacaagaaggaagccaccatgagaatcacaatggtcaataacaagcctattacagttgcctgatccacactgatttgataaaccgtgcgcttggtgctccggttccgtccgtctgacttggtttctggttgcaaattctctacaaaatcggttactaaggtggcagcaaggctgactgtcgtgctaaagagaacgccttgagacaaacgatgatagaaattagaccagaaagagcctgattggctagtaataccgaccgaaaagatcacgacaggcaagagaaaggccaaggtgaaatggatccagacccgataccaacgcacatcttctttcaagaaacgactaaaactctctaaattcaaacggtatcggaaaaatttgtaaatttcttccaccaggatgatgcccaaagcacaaagagtcaagagccaatctcccaacatgtacaaagggttcttttgacgcttagcataggccacaacccgtttttggtagcctgctagctcttgttttttattttttaatcttctactttccataggtccaacccttttcttctacttcttcccactcaatttcagcttgggcattgatatgaccatctgagctaatttggtgctgggtcttcaagccctcttgttcatattgagaggtgatgacacctcctgccagtacttctttgacatattttagatgaacttttttagggacatgatgggtcaagaagtctgctcccatcacctcaaagacccaatccaaatacttgctattgttgacatgtccgttcatatccaaatcgtaaaaccgaactcggtattcttgttctacacccccttctaattctttgaaacggggaccacggagcatggtttttgaaaactctgagtcaaaggcatccgtaatctcagacatgacaggatggaccttgcgtgtatcacgatccatcaagacaaaggttgcgaccatctcaataatggtattgccttcctcatctttgatattaaaggcccggtaacaaaatagtcgattgtgactcttggcataggtttcgatggtgatcttttcatcaaacacagggagacgctcgatcttcatattgtaatccgtgataatccagaccagattatagttctctaaaatgtacatatcactcatacccagctcaattgattgcatgccagatacctgtaaagacagcaagattaattggggaatcttaatataaccattgacatcgctcatatcaaaaggaattttcatgctgtattcaaatgtttttgccatcttctactccaaaataaacttctctgctacagtgtctcctaaaaagagacctttcttggtcatgcgaacaatgtccttgtcaggcaccaaaagtccctgctgggtcaattcatcgaccactggtccatattgttggtcaaaattcacaccaaacttttcttcgaaacgcttcttggaaacgcctgttttcttacggagtcccagaaacatctcttcttccatcatttctgtcagagtcagatgttcttcttggacacgcgcatttccctcttcgactgcctgcatgtagtggcgaataggtccatggttcttgtagcgaacaccgttgacatagccggatgcaccagctcccaagccataatactctgcattatcccaatacatgaggttgtggcgactttcaaaaccaggcttggagaaatttgaaatttcgtaatgctcaaagcccgctcgctccaactcctgaatgatgtattcaaacatctccgcttctaactcctcttttggtagaggaagcttgccccgtctcatccgattcataaagaccgtgtgattctccagaatcaagctataaaggctcatgtggggaatgtcgagggctagtgccttcgcgacattttccttgacctgctccatggtttgcgtcggaagggcatagatgaggtcgatcgaaatattatcaaaaccagctagcttcagacgatcgatattgtcatagatatcctgctcctgatggctccgaccaatctttttaagcaagcgattatcaaaggtctgtacgcccaaagaaacccgattgaccggtgaatccttcaaaacagcgatcttatccggatccaaatcaccaggattggcctcgatagtcaactcttccatctgagagagatcaagcgacttggtcagctccttgagaagatacgctagctgatctgcagataaggctgtcggtgtcccacccccgatatagagagtccgtaaatttgtgatttcctcccgacgaaattcttggatcaaatgatctagataagcatcgaccggttggttcttgataaagaccttcgaaaaatcacaataaaaacaaatctgggtacaaaatgggatgtggacataagcggacgttggttttgtatgcatacctttaattataccataaaatccccctaagtccgagaagaaaagggtggatgaagcaaggatttccttgacaagaaggaatgaaaagaatagaataaagctaatcacattcggaggtaaggagatatgaacaactaagtttcgttaaataaaatactttatttagtggactgcttgttctatctctttttgtgtgccctctcgcctattctccaactttttgttggcttaataaggtctttttctgtttgggtccacttgaatacagctctactaaataggtagagctgttttttgtcccagtagaaaggaatcttatgctaaaactatcccacctcaccatccgccatacaaaagatttacgagatttggttcgcgatctgtcactaaccattcatgaaggagaaaaagttgccattattggcgaagaaggaaatggaaaatcttccttacttcacgtcctcatgtccccaaaatttctaccagactatctgaccaaagaaggcgaaatcaccacttcttttcactcctatgcctatattccccagactttgccggaagcattgaagggaaaaacattggaagaatatttttttggagtagacgagttagactatgcagccctatacagactggctgatcaattgcaatttgatagcaaccgctttgcgagcgaccaagttattggaagtctatctggaggagaagccctcaaagcccaactgcttcacgaactttgtcgtcctcatgaattactatttttagatgaaccttcaaacgatctggatttggaaaccctggactggctccagcagatgatccaaacaagtccccaaaccatcctatttatttcccatcatgaagattttttgactcagacggcggataccattattcacctaagacagatcaaacaccgcaaggaggctgaaaccattgtagagcacctaggctatcaagactacagtagccagagggagcaacaattcaagcaacagtcccagcaagctgccaacgatcaacgaacctacaagaaaacaatggagaagcatcgccgcgtccgtcagcaagtcgaaacttccttacgaaacaccaaggatagcactgctggacgtctcctggcaaagaaaatgaagtccctcctctcacaagaaaagcgctacgagcgagaattccaatccatgacttcccaaccctatgatgaggaagttatcaatctgcatttttctcccctcactcccttgtctcctcaaaaacgaatccttctcttagatcaggaagtgctcgcaattggtgaccgggtcctggtcaagaacctctcccttactcttctaggacaggataaaatagggattatcggttccaacggtgtagggaaatccacttttctaaaaatgatatggggcctcttacaaaagaatgagagcatccgcactgtctatatgcctcaagattacactgaaggcctccctctgactcagacacccgttcaattcttacagcattcaggcgatcgcgaagaaatcaacaccattcaattgcatttagcctccctcaactttacctattctgaaatgcaccatccgatatcagaactttctggtggtcagcaaggaaaactctttctcctacaactagtcctcacaagtccccagtttctactcttggacgagcctacccgcaatttttcccctacttcccaaccagaaattcgacgccttttcgcagactacgcaggcggactagtcacggtctctcacgaccggaccttcctcaaagaagtctgccaaaaaatctatcgtctgaccgaacatggtttggtagaaatagagtcgctctaaggtaaaaaagattggcccaaaaaccaatctttttctattccttcgttgcctcttgtcccaattcttgggtacgtttataggctgcttccactcctgcaatgatgtcgccccgcaagccgacttgttctaagcggttgactcctgcgatggtagagccacctgggctacaaactgcatctcgcaagcgggctgggtgttctcctgtttctaggaccatttgactggctccttggaaggtccgggcagccatctgcaaggcttgctctcgtgtaagtcctaagcctactcctgcatctgccatggcttcaattatctgatagacaaaggctggtccacagcctgcgacagccgttgcaggatccatcaatttttcctcgatttcatagagagctccagctcctgctaaaagctgcttgacctgggctacctgctggtctgttactgcttgggagcgggccagactgatgacaccctgaccaatggctacaggcgtattgggcatgatgcggatgagacccacctggtcgttctggatcacgtcagccatcttttctagttccaggcctgcagccatggaaaccagcaagagattagagcgttgagccaagatgcctttatactcttctaaaagagggcaaatctgatagggtttgacccctaaaaagattacttcagcctcttgaaaggcttgttcaagctcagacgccgttcccccatactggctgataaaatcctgcaccttttgtggagaacgattaaccaagagcaagtctgtagcagccacttcttttgcgactgctttggctagactagctcccatgtttcctagtccaataaatgctactttcatttcttacctcacttgaccatttccactgatgatatatttgtaactggtcatttcccgtaatcccatcggtccacgcgcatggagtttttgggtcgagatccccatttcacaacctaggccaaattgacccccgtctgtaaagcgtgtagatgcattgacataaacggctgctgaatctacttgcttggtgaaataagcggctgtctcaggattttcagtgacaatagcatctgaatgatgggtgctatgagcttcaatgtggtccactgcttcctctactccatcaacgatcttgactgctaaaatataatctaaaaattcggtatcaaaatcctgttcctgtgctgctgttccagaaatgatagcctgtgcttgctcatctaggcgcaactcaacggatctttcccgtacatccactaaacgctctttaaccaaaggcaagaaatcagacgcgatcgctcgatccaccaacaagacctccatggcattgcagacagatggacggctggtcttagcattttcaataatggcgagggctttctggaagtcagcatctttatccacatagacatggacaataccagttcctgtctcgatcacggggacaatggcattttcaaccaccgcttgaatcaacccagcaccaccacgtggaataagcaaatccagatagcccttagccttcatcatagcaaggctagaagctcgactcgtatcttggatcagttgaagaagatcgggatggagtccggcttcttccaatccagccttgagggctgtcacgatcgcttgagcagaatgaaaggcatcctttccagtacgaaggaccactgcatttccactcttgatggcaagcgctgtagcatcagacgttacatttggacggctttcataaatgatgccaataacacccatggcgactcgaactttctggatttcaaggccattttccaagacttcagtatccagcacctccccaattggatctggcaggtctattaaagcacgaattccttgtgccatcccggcaatccgctcttgatcaagaaataggcgatcgagcatgacttcagagatcttcccacgcgctgcttccatatcgatttgattggctgctaaaatgacttccgtcgctttcaaaagctggctagccatggcctccaaggcctgattttttagggctgtattagctgtattgatacttttcttagccgatctcgctaaggctaattgttcttgtgttgtactcatacgttttcctctagaattctgaaaagagtaggtcaatctcaggagttaccgagatccaatcatcccggtggatgaggattcccttagcttttttagattggagcagatcgcgcacagctgattggccgagacggaccttgccttttcctagtaattgaccagtctcttgatgatagacgctgacgatgtcgtgataagaaaaatctccttctgccttggtcacaccagaaatcaatagactctttccatgatccaacagggcttgtgctgctccagcatctacccaaacggctcctttactttctgcataaaaggctagccattgcttctgggtttttaagcccttatcctctgcaaggaagtaactgccatctgcttgctcttgcgctgcttcgatcaaggcatcagacttgagagacgagcaaatatagacaggaactcctgactcggtcgcaagggtcgctgccttgagtttagtcagcattccaccagttccgttactactgccagcaccaccagccatctcgatcatctcacgagaaatgtgttcgattcgatccaagcgcttagctgttggatcctgagaaggattggctgtatagaggccatctacatctgttaaaagcaccaaaagatccgcttgaaccatggctgcaacctgcgcactcaaggtatcattgtcaccaacttttaactcagcaatcgagactgtatcgttttcattgataatcggaatggccccacgattgagcaagacagaaagggcctggtgggcattcttatagcgacgctgatctgcaaagtcatcctgggtcaacaaaatctgcgcagaaacaatgttgcgtaagagcaagttggctgtgtattcttccatcagtaaaccttgcccaactgccgcagaggcttgcttgtctgccaccttggtcggccgcttcttaaaaccaagggcaccaaagccagcagcaactgcccctgatgagaccaagatcaactcatgacctgattcatgtaagagagccaactgctgcgtaatgaccttgaccttctgtctggagagactcccatcgggattggtcaaagacgaggtccctactttaaagacgattcgttttgctttcatcgctatgtttctttctaatactatttatttcgtatgtaatgaaagtgaggctggacaaatactgtccagctctctatgtttgatagtaataactgcatgacgcagtggttgattgctcaaagcactgctttgaggtggcggatagaacatgcgaagcaagtatcctaagtctttgttcgctttttaggctccaaagataacctaatgttggaaacaaagtttcctttatctgcaaccttcaacagtctcccagactgttgaagctatgtggggtgggaaaattgaaaaggtttggggaaccttttcaacctttttatttttaggagttctttcccactcccattcttcattatccttttcgaaggtcttccagcgttttctcaaagatcgctggcacttctgctgtaaattccaaggtctcgcctgtacgagggtgagtaaaaccgagtgtccatgcatgaagaaactgtccttgtcctttaagtgtcttcttaggaccataagcaggatctccagccacgggatggccaatataggccatgtgcacccgaatttggtgggtccgaccagtctccagttgcaactctaccaaggtgtaattcccaaaacgttccaaaacttgaaaacgggtcactgcaggtttgcctttagccgtcaccgcctgttttttccggtccttttcactgcgaccaattggtgcttcaatcatcccacgatcgttcggaaggttgccatgaacaatagcccaatacttccggagagattttttgtcttttagttcctctgctaaggcgacgtgagcttggtcattttttgcgaccatcaagaggcctgacgtgtctttatcgatccgatgaacgatccctggacgcaattctccattgatccctgaaagatccttgatatggtataacagcgcattcaccaaggtcccactggtatgacccacacttgggtggacaaccatgccttgaggtttattgaccaccacaacatcctggtcctcataaacgatgtctaagggcagatcttctgcttcatagctgacctcttccacttctggaacttcaaactggatgatgtccccttctttgaccgtgtacttggcttttttcacagtcccattgaccagaacttttccttctttgatctgctcattggccacagctcgtgacaagggagtcaaatccgctaaagccttatccagtcgcgcaccggctacttcgattttaatttccatgcgtttcctctttcaacatcaggatcaggagcaagaatactccaactgtcaaataactatctgctacattaaaaatggcaaaattcataaaatccaggtggaacatatcgaccacaaagccctgacgcaggcgatcgataaaattccccaagccacctgcaatgactaaagttaaacctgtcaccatccaaagcgaccccttgagatgcttatagagatagtaaaaggcccccaccatcactacgagagtgatgagggtgaagaaccattgctgattttcaagaagcgaaaaagctgcacctgtgttttgaagataagtcagactgaccacatggggaataaaagacttgacgacacccagtggaatattcttcaccacataccatttgaccagctgatccagtaggaccaataggacgatcgctactgggaccattgtttttctcttcatttcttacctcttttgatcaaaatattctaccatgacctcgacaaacttctctgctacaggagagagatccatctcttcgcgtttgacatagaccattttattgtctaaattatcttctaaaggaatcacggtaatgccattcacggactggctatccaaaaagcctgatcccgtcgcataagcatccgtccgctccaagattccattcaaggttgcccggtcggtcacattgaacatttgtgagctcgagctggtatcgacaaagttctctgaataatagaggtactcatctttttcttgggtaaaacgaacagttggcaactgagctagatcttccatgaccagttttttcttcttagccaaaggatgtcctttgcgaaggtaaatatgagtctgaaaaggaatcaaatccactacttcaagccctaatttatcaacccgttgcataatccccttggtattttgacggttgagataaataatccccaactcactatgcccttgagctacttcatccaaaatttgaaccgtcgttgattcaaagatgcggaagtttttattttccggatagcggatcgagaattccgtcattaaaggtggcaagaagtcatagtgctgactagaaatagagaattctttcttctcttcttcgggactggcatattgattttgaaaaacatcaaaccctttgaccacttcctgcgctttttcataaaattccattccccgacgggttaaaaaagtcccagaactggtccgacgaaaaatcttaaaccccagttctttttctagatctctgacggagatggacaagctaggctgactcacatacattttttcagcagcctcacgaaaagtaccactgttggcaatcgccactacatatcgtaattgttgtatattcattctattttccttattacagtatcgatctattataccataaattaggggctgaaagaagagatccgtttaaagaccctcttctagtaaaataaaaaaagctggaactaaaacagttccagttgatacttattcaatcacttgactttcggctactttcttgtaccaatgagccgatttcttcggatagcgctcttgggtttcaaagtctacatagaagagaccatagcgtttttcataaccattagaccaagagaagacgtccatgagagaccaaatgaagtaacctttgacgtttgcaccatcggcaatcgcatcagacaagacctctaagtgttgcttcacataatcaatccggccatcatcataaactgtattgtccacaaattcatctttgtatcccagtccgttttcggtgatatagatctttttgtagtttggataatctttcttaacacgcatgatttgatcatacaaaccttgtggatagatgatccagtcccaatcagtacgaggtacatagtcaggagctacacgacgaccaacccctttgatttggtatttagagcttcctttttctcctttaccgttatggatgatttctgtttcgccgtcaaaagcttccatccagtcactcatgtagtagttaattccaaggaagtcgttcaaatctttagctgcttcaagtgccgcaaagtcttcgtcacgaagatccaagctaccaccattgacagataagatgtggtttacaccttccatggttgcatcggaatagtgtccaaggtaggttgcatctagaataaacttgttatggatgatatcttccaactcagcagcacgaacgtctgcaggatttttaggatccaatggatacttagttggaagggcgtgaacaaccccgatttcacctgtatagcctttgtctttgtacattttcacagcacgtgcatgagaaaccatcatattgtggtgagattggaagactttggcaagatcatactgaatccctggagggaatttccctaccaagtactgaccatcaccgattgggccgatttcattgaaggttgtccagtagttgacttctgggaattcttcaaaacagaaggccgcataatctacaaagtgttcgatgttttcacggttcaagaagtctccatttgagtggagagcttcaggtgtatcaaagtgatggagagtcacaaatggctccacatgtcgtttgtggcattctgcaaataagttatggtagaactccaccccttttggattcacttcaccatatccagttgggaaaatacgcgaccaggcaatggaaatccgaataccattgacaccgtattcttcagctaattgaaggtctactggatatttgtggtagaaatcactagcaggttctgctgtataccaatagttatcagctaagtatttgtcccatgcaacagggcctttcccatctgtatgagtagccccttctgcttgataggcagctgtagcgccaccaaaaataaaatctttaggaagtgtttttgtcattttttcacctttttcttgattggatcaaaggaaaagtgagtggagaggagttagtgagccatccatctccatctcacttattcgttcttattcttcaaactgcgcttgaacaaaggctagggcaccttgtccatcacgtgtcaatttaatgtattgagcaccttctgtcttagccaatttgatgcctagtttatctgtttctgccttcatgtcttcatagttagaagctacttgaggggctaggataaccaggtcaaattctggcaacatttcacggtgagcaccatagccacctgctgctgctttgacaggaacattgtattctgctgccgccttgttcaaggcattggcaaggagtccactagtaccaccaccggcacagagaaccaagacgtttgtttcttttgtgatattattttgaactggttcgtcttcaacaccagctttttcaagaatcgcatcagctttagctgtattgaagtttgcagcaactttttctttcaagctgtcgtttgctttaccagaacgttcttcttcgagaatttgttcatcataaaccttaacgaatggataataaatgattacgtccactaccactagaagagcagcaaggatgaaggaaagaacttggaagtttgtaccaaggacaattccgagaggaccaggtgttacccatggaaggttagcggagaaggagttcattcccaaggtatcaacaaagaatttgaagatccagacgtttgcgattggcgcaaagataaatggaatgaagaaggttgggttcaatacaattggagcaccgaagagaattggttcattgaccccaaagaaagttggaacgactgaagcacgtccaatcgcacggtttcgttcagacttacacaaccacatgaagaggaagggaacaatcaaggttgcaccagtaccacccatggtaacgataaacatttgagtcccagatgtgatgactttatcagcatgttgtccggcttgaagcaagtgcaagttgttatcgatatttgcatatgtgatcgccgcaatcgctggttctacgattgaaggaccatggatacctacaaaccagaagaaggcataagcaccaaaaataagggtaattccaagataaccatctgccgcagaaaacaatggagctagaagtgttccgattgattccgcaactgttacaccgatagcacctttaacaatcaattcaaatgcatacaagagaacaattgaaactgtgaatggaatcaaatctttgaagacttgtgaaatattcggtggaacctcgtctggcatgcgaatcgtcacattattcttcacacaaaccttataaacattaactgttacaaaggctgcaatgaaggctgtcaacagaccttttgtacccatgaaggctgtaagaatgccaccatctttaccaggttctgctgccatgagtaggaaaccaaccatagaggcgagcatggtagaaaggtagttaatttgattggttgctggcagatcccggttcattgaatcggtcaatgctttagcagttgttcctccaacaaagaaggccaagatgcccatagaatagttatatggagtcatcaagaatgtttcaatatctttagaccagtggaatccccaagcgtttggtacatacgcaattaggatgaagatagatgagaataagattacaggcatccctgcaatgaaaccatcacgaatcgctcgcaaatatttgtttcgagaaatcttctcaaagaatggtttccctttttcaatcagttcaatcagtttgttcattatttagctccccgtttgtataattcaataagatgatgaatcacatcttttaacaagatggttgtcatcaagtgatcctgtccgtgcatcatggtgatgctgtatggaatttcttctcctgcagcttcttgcgctagcatggtcgtttgagatttgtgagcctcagcaatacaggaccctgcttcttctactaaggattctgctttcgtaaaatcaccgttttcagcagcttttaatgcttccactaattttgatcgagcgtcaccggcataagcgacaatttcaaacccaagtaattggacttcctctttattcatgttggttcctccttatgataccttttgaaaatttttataatagacgttgaatatgcaaggctaaatagactttttcattaggagatatcttagctccagtctgttcagcgatggtttggtagatctgatgactaatctcataagcctttggataacttagctggatcagttgttccatctcgctcaatccttcaggatcctctcttcccttatctagggagtcaaggaaataattaagatggatcataaagcgatcatagaaatgactgttctcttcttttcgtttcaatccattttgagctagtttttcttctacagctttcaaaatcgcttggcgatcttggacatcaggatcctgctcatgaatgacttccccttgtgcattgatgaagtgataggcgatacgattcacttcgtcatcaggaaattgatccaagagccgctctcgaaagatttcaatcgcttcctttgcgattttatagggaatcggatgcatagcagacgcatcaggtagatcactgtgtttgtatcttccctgttgaaccgcctggtaagaacaaaagatgtgatctgttagtgtcacatagatatattcttgaacaggataggcatatttcttagacaaggtatcaatcacttcataagtggttgtgatgaaatcaagaggaacatcctttagaagggccataaagttttctcttgattcatccgtgtttaaacgaaatactttttcgaccttatcatcagctactagatcatgtttctttttcccaaaagcaatcccactcccaacaacaattaactcttgttgaagctcattttgaaccaaagcaacattattgttcattggatggataatacgatacatgaggctctcctttgtaaaatttgttaaaagcaaataaaaatgaccacgaagcaactgaaaaaactagcctatgccaatcattcaatctacttgtggtcacgcctaatctaacttagtaacgctcactgctatctaacttatgaacttattctatcataagttttttattttgtaaacccttacagcgaaaatttttaaacattttttataaaaaataaacaaagcctaaaaataatgaagaacattggaaggaatttcttccttccaatgttctaactgttgctttaggaggcaatcatcatttgaatcttatacgcgttctgtccaaggtgtcgctactttggccaagactgcgttcaattcttcaatattttgtcgaccttctgtacgaagccattcacgagcagctgcttctccatctttgatgtaggcttctactgaacctgcccatgtcgcacgtccacaaagaacaccgttgaagtttgcacctgattcgtgggcaaagacaagagtttcttggaagagttttgcagatacacctgcactgaggtagatgtatggaaggttggttgcttcttcttgttctttgaagaaagcagctgcttcttcacgactatagacaacttctccttctccaaatccttccacgaagttcacattaactggaacttccactttcaagacatcgatattgaaacgaggatctgaaaagactttcatagcctcaatcaccttacgaggtttcactttcgcatattcagcagaggttgcatctgcaattccttcatcataagccaaaatttcaaggaagaatggaatatcttcagcagcgcattcagaaccgatgcgttcgatataagcttgtttttcttggttgagttcatctgcactgtctacatcatagtagagcaagaatttcacagcatctgcgccttgttctttgatgcgttttgctgaccaaaggttcaagcagtcaggcaagcgtttggtgctagatgtatcgtaacctgttttttcgtatgcgagcaagagtcctgcttctttgtccaaggcttttgtagcaggtagaccatattctgggtccaataacatagatgaagcatattttgtcaattcatcagctacaaggacttttaattcttccatttgtgctactgttggttctgtgtcttggtatttggccatcaagcgtttcaaagccccacgttggtcgaaagccaaagctgaaatgacaccgtcttttgtactaagacgttccaaatagttgcgtttttgttctgttaataccattttatacctcttttacgattaattgttgatacaaggcatcatagtgccccatgttgacatgtcctgtttgtgcttcttgcgcatttaacattccaagaacatttgctttcttgagcaagtctgcgtcactctcatgatgatagagaccagatgcaatccctgcaacagtcgaatcaccagatccgactggattgacgacatcgatcttaggaatatctaccttatagaagacatccccatgcttagcgaaagcgccatttgcaccaagggagacaatcacccattcgataccatcaaagagagaatcctgaagaacttcttttaagtcttccacattcttactcacttcttttcctaacaactgtgataattcttcattgtttggtttaatgaccgtaggcttgacagctgcttgaatggcagcttctaaagaagctcccgagcaatcgagtacgactggtttcccagcatcctttgcaatcttgacaaggctagcatagtagtccactggtaaaccagcagggagactacctgagatggcgacaacttccacttggtcgatcaagtgacggtaatgttgaaggaaactttgcccttctttctcagaaatggttggacctttttctaagatttctgtttgcttgccttcgtgaaggatggcgatacaattacgtgtatctccagcaatctcaaagaaacgtttctctatctcttctcctaaatgatcgagaatgaattgacccgttcgaccaccaagtaggccggtcgctgccactggatccttgatctcagaaagtacacgggtaacattgagacccttcccaccggctgtcttactcacctcagctacccgattgactgtatccaactggagtagatccaaaggataagagatatcaatcgaagggttcatcgtgaccgttaatatcatatgtcacctcttagtcgtggtattcaccacggtcccatttttcaaggaattctgtaaagaaatcagcatccgcttgatgggcattatgggtttccacatgttggatcttagcgatcaattttttattttcttcagttggtttgtattcagcgtggatgaatgcttcaatgatatcgcacatgagtaattcaccagtgatcttaccaccaaaaccgatcacattcgcgttcaattcttctttggcataaagagcagttgtcatatcgcgtaccaaagcagaacggataccaggtactttgttaacagcattgttgattccaacacctgtaccacagatacaaacaccaagatctgcttggccacttgctacagcttcaccaactttcttaccaaagattggatagtgagtacgtgtatggtcataagtcccaaagtcgagcacttcatatccttttgatttcaaaaaatcagaaacagccattttttcatttgtcacaatgtgatcacaaccaattgcaattctcatttgaattctcctctcattagcacatcttattcaacatatcgacacggatttggtgacggccaccgtcgtatttaccattgacgaagcctttggcaatgttcttggccaattcatccccaacaatttcagcacccatggtaatcattcgagaattgttgtgtccacgtgtcatataagcagaacgttcatctgaaacttctgctgccaccattcctttgattttagttgcaaccataaatggaccagcaccatatgcatcaatcacgattccaagattttgatcgtttttgttcacttcgctcgcaactgcaagtgtcacatctacaaaatcttgaccttcagcagttacatccacaacatcgaagttttcttttacaagaaactctttcacgagatcttttaatcttaatcctgcagcatctgcaccaattacaatagacatgtcctgtcctccttttgttcgtttcagtaaatatccctgttgttaatttttcacaaaggaacattttcttacttttgatattatattacacctattttgaacgaaagtcaacattaaattgtttattttcgaacattttttaaaataaaaacaccatatccacaaaagatatggtgtcagttttcaaactacatatgaagattattttgcatttgcagcatattcttcgttacgtttgatcatttgttttctgtaccaagcgaagattccgatatagaatgccaagaagacaactacaccaaggatagctttgatatcaccagttgttgcgttaccgattgtccaaccgagcaatttttcaactggtccttcaagagttgagtgagtgatcaattgagtagaagctacccctttagggaaggcatcaacactcttagccaattgagttgcaaatggtgcaatcaatgtacctgaaagaaggaagagtggcaagagaaggcttccgaagatgatcatacggatcaatttaccgcgtgttacaaccaacaaggctggagtcacacccatagcgatgataccagcaagtggcaagataccatttccaactttagaaagaagcactgcttcgatcaacatgattggtgcaagtacgttcgcacaagcccagatttcagcacgaccagcgataaatggccagtccaaaccgatgttgaatttacgtccttgaagacgtttagtagcaacgtttgtaataccttgtgacaatggttctaccgctgcgatgaaccaagaaccgatcaatgagaacaattccaagcagacaccagcagtcaaacctaggctcaaccaacctttaataaccaattcccatttggcagcatcttgcacaccagctactggatgtggagtacccatgataccgatgacgataccaagaaggaaaccgataaagaatttagagccccagaaaccgattttcttgtttaacttagcagcgtcgaagtcgtatttatcaagacctgggaagaatttgtcaaagattttatccaagaccatgatgattgggttcatcatgtaattcatgtgagtagatgtcataggtgatgaacttggtgcattcaaaagatcatcaaatgttggtttcattaagtctgagttgatgattttcataacccctacaaggacaactgcaagagtggcaacgaaaagtgaaactccttggctgacaccgttgttgtccgcataccatttgattaaaagaccagtgatagacaagtgccagatatcgaagatatcgacatcaagtgtatctgttttcttgatcgcaagcatgataatgttgacgatcaacataatcaacaagaagtaaagtgtccaagctgacccccaagtgatggtcgcaagaggcgcccaaccaacgtcagtaatattcaattgaataccagtattctcaacaaattttgcaagagatgctgagaaagctgtgttaagcatacctatgatggcaccgataccagtaagggcgatggcaagtttaataccaccttcaagggctttagagaatttcactccaaacaagagagccaataaagtcaagacgatcaacataatgatcggagcacccatgtctaggattggtttaaaaaatttattggcaaaatcaataatgccattcataataaatcctcccgatttataattttatatattacgctttaatcatttccaactttatcattggataacgcttacaaactgttttaaaaaaatattaacttaatccatgttctttaatggcagcttcgatgttatcaaaaactggcgcactcattgctggaatacggaataaaattggtcctgcttctaccactggaataccaggatcgaatcccaaatcagttgcagcaattggagtaaagatgtcatagcctgaaatcaagtcttcattcacgtctttgaccatgacagcgtcacaacgcacatcataaccgcggtttgacaactcttcttccaaggcattcttaatttggtggctagagttaacacctgcaccacaggcagctaaaattttaatcatttggatatcctccattataaatatttacgaatgttttaggaaatagttcccgtaatgtattgataaagcttatcttcactatctaattttgatagagcttcgagatttccattagatgtaaagaaatccatcagctcggccaaaatattggtttggctagagcttgaattgttgataatgaagaataaaagtgaaacttgaacttccttatctggagcaatcatattatggaaggttaccggttgatccaaacgaaccacgaccacattctcagtgagattatggacaatgtctgtgtgcgggatcgccacatttggtaagtccttaccaagaaattccatgtctaatccagtcgggaaagacttttcacgctcaatcaaagcggaacgataggttggtgtcacaatctgtcgctcttcaagtaagctcgctacctgctcaaagagatctgtttgatccttggcgtgtagacaaaacacaagatctttgttaaagagttgatttaaacccattgctgccacctccttatctaactatttattttatgattatagtatatcactatattgattgaatgtcaatcatttttgtcttattttgttcatttttgttcgtatcaagctatatggctctttctaaccgtcattttccaacatccttaaataagtaaaaagagagtgggacagaaatcggtaattcgttagaattcgatttcgtcgtcccacctccgcacagttgagtagggctgtaaaagctgatgaaatcagcgtagtagagcccactcaaccactgcgtcttgcccgacaatccaaaaataattgagaggctaggacttttgtcccagcctcttgatcttaaatgattttcgtatacaagccatatttgtctttgattttctttggaatactatcatcggtaataatggcattcagatcttccacacgataaaaactgtagaaggaataactatcaaacttgctgttatcagctaccacatatttctctatcgcattattaagaataatagcattgccatttccttcttcttcattggctgtggaaacactatgcccatcgattccattcaccccgataaaggctttagaaaccttgatttcttttaagagtttattggcaaattggccgacaaaagtttgagttttcatccgatagcgaccaccaactagaatcaaatcgtaatttgggaaatcctttaatttctcaaaaataggtaaagaattggttacaatactgacatccttgccttctagataatcaccaataaagtccgttgtcgtgccagacccaataaagactgtatccccattttcgattaactctgcacattttttggcaatcgttcgtttctcttcaatattgatcagatttttttcactgtgagaagcctctaacaagctatcttttacctttttgtgggccccaccatgcacgcgaactaaaaggccttgtttttcaagatcgatcagatcgcgacgaatggtcatgtctgtcaccccaaagagttcttttagttctttgaccgataccacactttttcgatccagttcctgaagaatttcaacatgtctgctatctttcatggtactacttccattcctactatatttgtctctattatactacatttttcaaaaaacacaaattcaaacattatattaacaagagtaaacatgatatttttataatagataaaagaaaaaagccttccgtcaatccggaaagcttttatttatgctatctctagcttcctcacctttggatcaaggctcgggaaaaaaggtttaggaaaccttattattttgcgattgggtaaacagaaacttgttttttatcgcgacctttacgttcgaagcgtactacgccttcaacttttgcgaacaaagtatcgtctccaccacgtccaacgttcacacctgggtagatgtgagtaccgcgttgacggtaaaggatagatccacctgttacagtttgtccatcagctgctttagctccaagacgttttgcttgtgaatcacgtccgtttgatgtagaacctccaccttttttgtgggcgaaaagttgcaagttagcaagattcaatttcaacataattgttttcctccatgttagttttctgtgataactcttgtttggacgaactctgaagagttctccgataagtttgccatccctaagaaaaatgattcaaagaatagttgggtcatttctctttgatgaggtggaatatctgtcgggatcgttacccgaaggaagccaccttcttcttcgtttaattctagatccggttcgtagcctgcaaatttctcaacagagttgacaaagttaatggctagagtcgaaaccgatgcacacacgacatcaaagccgtattcaccgcttccagcgtgcccagtgatttctgcacccctcagctcgccatcttcggctcgttcaaagactgcttgtatcatgtgttctcctaaaaattaagcgttgattgcgttgatgacaactttagtgtaaggttgacggtgaccttgtttacggtggctaccttttttaggtttgtacttgtaagtaacaactttcttttgttttccttgtttttcaacagttccaacaacagtagctcctgaaacaagtggagttccgacaacagtgttttcaccaccaacaagaacaacttcgttaaatgtaacttcttgaccagcttcaacgttcaatttttcaacgtagactgcttgaccaacttcaactttaacttgttttccgccagttttaatgattgcgtatgtgctcattatgcacctcctatgtatttttgggtttccccgtatttttgtgaagactcgcctagcatcgtgggacgaaccacttactctcatggaaatgagcgacgatgttcgagcggttgcacaggcatgtgcatagtcaactctctaagtatatcacttctatcagacaaagacaagcttttttgccccttgaaaacggatttttatctaaaaagtcaattttaagataaaaatagatattatatactccttcccatgaacttttgatgagaaactgcctgcttagtattcttcattcatttttcttttatttccttggacaaatgacttcaacagtcataaaattcatgtagcaatttgattaattcttgttgttgttctagcaaaatctgaccgattgttgtcgatttgatccgttttctttcctctacatcctcaatgactttcttcaaagaggtctgctcaaaaggtgattcgactatcttttgaacattttggaagggctgatgggttaccagttgaaaaccataggaattattgagtaaagaatagccagcagtaccagtcttcttttgataggcctcacacaaccctccatcaattacaaagagcagtccttcaccacgaataggcgattctccttttccagtcttaaccggtgtatgtccattcacaatacgggattcttttgaagtgagaccaaattcctctaagataaactggcaaatttttttagaatttcgataagtgaaatactcattttcctgttccttatgagtatttgtatcctcaatgaaataacgttcaaaagtcgtcatcttatcttttccaaataatggggaagattttcctctccagcaataccaaattaaatcagttgaaaaatcatccccaatttctttgttttttgatgctagacgtatatggtattcaaagaaatccaataattctctacctgcgtactgggcttgatgaagaacaaaaggttgaaactcaccagatgcctttaagggaatacagccatgaaaaagcaaatgttgattgtaaactttatacatggaaccctttttcattagcagttcgatatgcttagctaattttggtgaaccttgataggaggccaacatgcagtctacaacttgattttcctctaaacttaattcaaatgggtttaatgaatcaatcgtttgaaaacaggtgttttgcaaggaataggtcaccccatcaatagtaagtgactccttcaaatagtcaattttatctagcaagatctgattctccatctgaaactctggacgtctcttcatcagttgagcttccaacttaaactggataatcgctagtgcctggtgcaccttttctaattgcaatatttcctcttctgtaaactctttttctctatttcctaatataggcctaaatttagcattttctttgtaggttttatcagcaaacaaggttagagaacgaatgttcaagccataagccttttcgatatcccataagtatccataacgagctgcaatacgtaatagattcaataaacaagctttggaaccaaagaaagctccaatccaaataatatcatggtttccccactgaatatctaaagaatggaaacgaaggagttcatccatcacttgaggacttcccgctcctctatcaaagatatctcctaccacatgaaggtgatcaatcaataagcgacgaatacttctagcaatccctaaaataaaaggatctgcttctcgtagttcaatgacatagcccaatatgttgtgaaaataagactttttttctgctagagagatatcgctatagatcagttcttctataatgtatgcatattcttgtggtagggcttttctgagcttggaacgactatatttagcagctacaaaattcaataagatcacgagttgcggaatcgtagacttataccactctttacttttattcgttcgctctaaaatcagctctggataagacaccaaggcagacagtagatcctttttctcttgtattaaggaatcttcaaaacagtcattaattttctcatttaaaattcctgcacaactcctcaaaatataatcaaaagccgcagattctccatgaatatcactaatgtagagctctgtccctttaggaaggtttaaaattgcctcaagattcgtgagctcagtaataaccttttgtcgagtatcaaatttttctagtaaaatacgcttatattgctccatcttatctctccaagataccctattttgtacagtgcaatcacatccgaaacttaattcatcttcttcaattgctcctcgattaagaaggctgtttcctcaatggatttgtccgtcatattgatcacttgggcccctaattttttaaagattatctttgaataatctaattcctgataaatcttttctaaatctgtgtaattcgtttcctggacaagccctaaagatcctaaccgatgacttctaattttcattagtttttcaggctcacagaccagaccaatcaatcgacgagaatcgaccttctctaatacctgaggtaaaggaacttctggaatcaggggcaaatttgcaactttatagcccttgttggctagaaaaatactgaggggagttttagaagtacgggaaacaccaagcaaaaccaaatctgcgtctaaaaacccctgcggtgccttaccatcatcatatttgacagcaaactcgatcgctgaaatcttcttaaaataatcgctatccaaacgatgcaatgttcctgggacttcgattggtctagtccctgttttttcttgaatgatttcaaaaaatggatgcatcagatctagataagacaggccctgtttttggctaaattccctggctaccgctgacaactgactattcactaaggtactgattacaagagcatcatccttcatggcatcacataaaatatccaacaactcctcttcttgattgatgaaagggaagcgataactattattaaaaataatatcaggatactgcgcgctaacagctgataataatttctgggaggttccccccaaagaatccgaaatactataaacgatgatttcttttttcatatttattcctcttctcttttcatttctgcacttctagcatgctgtataatataatctagcagggctgatttagtcacacttcctacgatttttcggtcgtttttctcctctactacaggcaatgaatcaatggagtgatcttgaagtagtgcagcagcttctaaaatattcatttccttgttacaagtaataatatgtggcattcttgtcatacagacggctactggggtgctatcaatatttgaatttagtgatgcacgtaacaaatctttgcgtgacataattccaagtagtaatttatcttcatcaattacataaagaacatctgcatcgtacataaataatgtgataatcgcatcctgaatataagaatcatgagtgacaagaacaggtgatgtcatgatatcagctacatctttttgaaaggtatcaaaaaagaacaaggtttctaaatcagatcctgagtaagtataaccaatttttggagttgcttttaaaataccaaccaaggtcaaaaaagaaagatctgaccgaagagttgctcttgaaatatccaataattcagatattcgctctccacttactggctgttggattttaacaatttcgactattttcttttgacgttcacttaatttcaatgagtcgtaacctttccttagttttaaaaataacgatattaaaaagtagtgaaagaaaaaatgtagaacatatgcttcaactctattaaataatcatcatttttattgtaaattatagcacattgatctaaattgtcaaataaaaaaatgtatttattgtttgacaaggatatgtgatgtatattacaatggttttgtcataaatgtgatacatattttataaattttggaggctaatatgacaaaatggatttattcctttgaagaaggaagtgcaaatgataaggatctcctaggaggaaaaggggctaatttggcagagatgagccgtttgggactaccagtcccacctggatttaccattaccacccaaagttgtatcaattatttagataaccctgacttcttcgattccactttaaaagaagatattttgaaagcggttactcatttggagaaaaaaacagaaaaaaccttcagcggagaaaatcctaacttgctcttggtctctgtccgaagcggagccaaattttccatgcctggaatgatggataccatcctaaatcttggcctcaacgaccaacgtactcaattactagccaaacagaccaatctagattttgcctacaactgctaccgtcgtctactccagatgttcgcggatgttgtctatggcattgataaaggactttttgatgattgtctcgcccaatttgaacaaatgcaagcaaaaacagtccgtaatttagacttgtacgaacatcaggaattgatcaatcaatacaaggatctttattccaaacacggctaccagtttcctgaagaaccaaatcaacaactctatggtgcgattcaagcagttttcaaatcctggaataatcatcgagcaaggatttaccgcgaattacatcagatccctcatgatttaggaacagccgtaaatgttcaatctatggtttttgggaatagtgatcagaccagtggaacaggtgtttgcttcactaggaaccccgctaatggggaaccagaactttttggtgaatttttacttaatgctcaaggagaagacgtcgtagctggtattcgtactccagagcccatcgcctccttaaaaatttcacaaccagaagtctataaatcttttagagactatgctaccatccttgaaaaccactataaggatatgcaagacattgaatttactattgagaaaggcaaactctatattctacaaacccgtaatgggaaacgcacagcaaaggctgctttaaaaattgctctagatatggtagaccaaggtcttattaataaggaagaagctctcctgagaatctctcctgcttctattagtcaactgattcatccagttttccaagaatccgctctagcgaaggctcctttcatagttcaaggcctaccagcaagtccaggtgctgctactggcgaaatcgtatttactgctgaccgagcaaaagaagcccatcaggagggtaaaaaagtaatccttgttagacaggagacatcaccagaagatattgaaggaatgattgtcagccaagccattgtcactagtcaagggggaatgacttctcacgctgctgttgttgctcggggaatgggaacctgctgtgttgctggttgtggagagttaaatatcagcgaagagaacaaaatcctttcctgtggtcctcttgtccttactgaaggagatattatttcggtcgatggctattccggccgtatttatagtggagaaattccaactagcctagtcgaacataaccaagatcttcagcgtttactttcttgggctgatgaagtagcaatcctcaaagttcgagcgaatgcagagaccatcaaagatttgcaaactgccatgaaatttggtgcccaaggtgttggacttgcccgaacggaacatatgttctttggacaagaacgaatcctcgaaatgcgacgtctcattttagcagatacagaagaagaaacacgagaagccttaaataggctattagagttccaagaaaaagacttctatcaaatgttccaagcggtccaagataaaccgatgattgtccgcctattggatccaccgatgcatgaattcctacctaaggattttcaagagattgaaattttagcaacaaaacttaaaaaatctcctgaaaaattggtcgatcgtatcgaaagtttgcaagaaaataaccctatgttgggacaccgtggttgccgtcttggcattacaaaacctgaaatttacaagatgcaaacagaagccatttttaggagtgctatcaagctacatcagcaaggtcaagagatcaaacctgaaatcatggttcctctaattgcagatcagaaagaattggagttcatcaaaaactatttggttcagcatattgaccaactcttcaagcagtatgatcaagaacctttcccttatgaaattggtaccatgattgaacttccacgagcttgcctaacagctgacaaacttgctgaagaagctgatttcttcagttttggaaccaatgacttgacccaaatgacttatggtttctctcgagatgatattggaaaatttattggccaatataaagagcttgaaattctgccttttgaccctttccaaatggttgataaagaaggagttggcgaattaatgaaaatagctatccgcaaagcacgtcaggtaaaaccaaacatccctattggaatttgtggtgaagttggtggagatccctcttctatttccttcttccagaagattcaagttacctatgtttcctgctctccttatcgcattcctgcagctagactagctgtcgctcaagccactattcaagctagaagctaagctcagatccattgttaaaactattttatcctcaatattttaaaggatctagttcttttgttgcggtctagatccttttctttgtttcgatagagaacagtcctatgaggatgatctccattaccttttctattctgtctttcatggttcatatgagaaaacaaaactgtcttctcactggctcattcaaatagaaaacaccccaaaagcaagatgtttcatctcaacttttaaggtgtagtttattcatttagtacaactatttttatagcaaatcctcgatcaggtcatcgacctcatctttttctgcttttggtgtgatctcggttacgatgatacctgctaccgcacgctcaaccaaagcttccacatccatccgttgctcatactgctccgcatttttgagtttcggattcgtctttggacgatctggtgcaaagatggtacaacaatcttcgaatggctggatagagatttcaaaggtatcaatctcttgggcaatatcgatgatttccaatttgtccatggtcactaccggacggataaccggcgtattggtcactgcattgatggcctgcatactctctaaggtttggctagccacttgtcccaagctttcaccattgataatgaccaaaccaccgcgaacctcgcgaatgcgatctgtaatgcgcatcataaagcgacgggtcaaagtcatgaggtaagcttctggtgcttttgccttgatttcctcttggatctccgtgaagggcacctcgataaattggatattgcccccaaacttggtcaacttccgtgttagatcatgagcttttttaagagctcctgggctggtataaggtgggctagcaaagtgaaccgcctcgatatccacaccccgcttcaaggctaggtaaccagctactggagagtcaattccaccagaaagcatgagcatgcccttgccagatgtgccaaccggaaggccacctgctcccttaatagtttcataagagatgtaggctgcttcttctcgaatttcaacttgcaagttgatatctggttttttcatctgagcttgaatcgttgggatcgcttcaaagaccgcacctcccaaggtttggttgagctcgcgactatcgagttcaaaggtatggtcactgcgcttacttgagattttaaaggtcaagccgtccttgtaaatctccttcataatctcttgcaccgccactttcaaggctggtactgatttttcaatcttgtaaacaggtgaaaaattttggattccaaaaacctgcttgagggattcggctaccggttcataatccgtcccatgtagataagcatgcgctcgatcacgatccgctgtcactttgacagctggatagatagataaaacagattggacattattgcgaagtttattgatgaaacgcatgcgattctttcctttagtagaaagctctccatagcgaatcataatttctgaataggttaaggtcatgttgatttccttctaaaattaacgtacttttcgtgtttgttcgtaaatcagtttgaacttggtcaagaattgctcgacttggctcatgtcattttcaagatcgagactcaagcgaacagctgtctgtgcaatactcttatctactcccatagcaattaaggttccagctggttttccagctttggacgagcaggcactagtggttgagatgtaaatatcaaactcttcaaaggcatggaccactacttctccacgaactcccttgatcccgaaagtcaagatgtgaggtgcaaagtgatcctcaccagaaaagatagtgacatctggatagttggccaattctttgcggatgacttctttcatctgctgggtcttgctggcaaaagcttcttggttttccatggctaagcgtagggcttttgcggttgctgcgatacctgccacattctcagttgtcgagcgcatttctttttcttgaccacctccggttaagagtggagtgatctttttgcctcctttgatgtagacaaagcctactcctcgaagcccatggaatttgtgactagagaaggtcgcgaaatccacgcgctctggtagataaacttctgttgctacctttgccaaagcttgaaccgcatcgacatggaaactaatcgttgggcgatcttccagaagagctgcgatgtcatggatgggctggatagaaccaatctcattgttgacggccatgacagaaaccaaggtcgtatctggacggagaagattagccaaggcatccaccttgacaaagccacgcgcatccactggagcgtaatccacttcgaatccctgcgtctttaaccaagcaaccgattccttgatggcaggatgctcgatgtcagagacaatgatatgcttgccataaggagctttctcaaaggcgacacccttgaggatccagttgtccccttctgtcccaccagacgtgaagtaaatttcctcagctttcttgccaattagctccgcaatttgtttccgagaagcctctaaaatacgagtcgcttgactacctagattgtgcaaactagaagggttgccccagatccgagtcgctacttccgtataagttgcaagggcttctggatagggtttagtcgttgctgaattgtcaaaatagatcatgtcctacgcatccatcactttctttttacgtaacttctattttatcatttctgaccgcttgggacaaggatttgataaagagagagttggcaaaatcactctataaaattcagttctttttagacatttttcagaaaatgacttataataggaaagtgttaaaaaacaatttttgatagaaagagaaagaacatgtcacaatattcaagaagcaacaaaaaccaaaaaccagaggaaaaggcagatacaagaccctcacgtggtgaaaaagtcaaacaaggcctgtcactatttcaaacagttgtcgccacgattgccagtcttttagggattatcgtcacttcttttacgattataagcctgcttaataaagacaatcaaaaaacagaagataaaccatctagtagcaccagcgtcgtcgtggttcatgataagggctctgattccagcgctaccaatacagatgctaacaccaatacacaaaccagttcaagcaatacagatgctagttcacaaaaagaaaccgatagctcatctgctacagaaaccagttcatctgccgcacaagaccaaggttccacagcaacagacagtggcgcagatacagcatcatccggaaccaactaaaaaatcagtaagactgttcttactgattttttttggctttcgattccagctttttctgatttttatagaaagcatctatctcgttgtcatactcccatttgagttttgaacgctcttcctggatttgatccaatcattcatatggaaacttgttgggtctatctctgtatgttgattcagctagtgaagcatctagattatccaaactgctcaaattccaattactcaagtaatctaccccctatgtcaatgtcggatcctatatacatctcatctaaatttaatgtattgtcctcattaattgggatatctactctccaacccgattcttcaatatgatttatacgtccataaacattcatataatattcaggggttgtcagtccaccatcactccattgtgtatgatcccaatcaatctgaacggattcgacttttgaattttgtactttgactaaatcaataaccttctgttcgtgttcttttagatagtccagttgttttttctttatagtttcttcatcttcctttaggtctttcgtagatgaagtagcaatcgtttttccttgttttgtatcatctttctgtttcacggtacatccacctacaataagcagagctacaattgaagcaattgtagcatgatttttcgacttttcataagtcctcctatcattctatacaaattattctttaaaatgtccacctgtcattccctgagctattatggactcatagctcaaattctttcctcttaatagatagaatgatctgttgattttatcaaggaaaattcgaaccagaaattgaatcaattgaagttggattctcaatatttggtttggggacaataaaaaatgaatagccattgagttccttatcatttgccccatagacctttaaacggatgtcaaacccagattccgtaaaagaaccactatctcctactttcacgctatcccaatcatacttgactcgaacaacttctggatcattcgactttatgtagttcgtaatttcggactcgtgtttttttaaaaagtcgacttgcctttgagtaacagttgctgtatcctctttggtggaggaagaaacattcattttatcttgtttcatctgttcttttggttttacagtacagcttgtgatgatgagcaatgcgacaaataaagcaagtaaattaaaaatcattttttcttgtctcttcataagttctccctatatagatattaattgtagcatttgccagataaaattaatgaatcttactcattttttcgtttttgataaactccagtgaagtcatttagatattccagcagaataactaatttaacaacatcgactacaataacttacaggctttaaatctttcaggtcttactcaatataatcacccttaatactaatatgatagcccatactgaatgtcatcttttgatcagaatcaaatacgacatccaccctccatcctgaatcttcaagttgattgacggtaccaaaaatttctatgacctcatctccaccttgtggtgtcccatttccatcatcaatccattgcgtttcgtcccaataaatctgaacagattcaacctttgaactctttgatttcacaaaatcgacaatttctttttcatgttctttcaaataggcaatttgtttttgcttcgtcgcttctttatcttccttggttgtcgaaggggttgcaatgggtgctggtttcgtttcctcttttgattttatagtacatcctcctatacttgcaaggagagctaaggtagtgattaatttaaacgccgtttgttttatcatgagctatctttctctaaaacagttctttttcaaaatgcattgtacttacttaggaaataggctttccgccaatcgtaggttcatgaagcataaacatttctcgcatgttaattgactgatcgttattaattggaatatctattccccaaccagaatcgtcaatatgattgataccaccaaaaacgttcatataatattcaggagttgtaagcccaccatcactcatctgagtttcatcccaatcaatctgaactgactcaatttttagattttgagccttcacaaaatcgacgatttcttgttcatgttccttgagaaaagcgatttgttctttttttatttcttcttctaatttttgtacgactttctttgaagatgaggccgttatcttctgttcgggtcttttggttagatgcatgatttttcctccaagaaaaaccagtcctaggatcggtaacagaatgatcaaaaataattccatttgtctcttcatctcttctactccaatcgttccattcatgactgaatgggccagtcactttccttactattatagcatctttcatttgaatctcaatctaactcactagttagagcttttataaggtaatcaaaaaggaacccaaaggttccttttgtgttatttccgatacatcttgacctgaaggtaaagatcgttatagactccaagcaatttcttgcctaattgttgatagacttccaaatggtccagcgtttcatcgcttggatagaaggattggtcattttggatttcttttggcaacatggctttggcttttttatttggcgttgagtagccgacataaagagcatttttcaaagcatttttaggacgaagcatgaagttaataaaggcatatgctgcttctttatttttaacggtttttggaatgacaatattatcaaaccaaaggttgctggcttcagttggaacgacatagcgaagatccttattggcatccagcatttggctggcttctcctgagaaagtaaccccaatagctgcattgttttggatcatataccctttcatctcatcagcaaccaaggctttgatgtttggcgtcaaggtgtagagtttatctactgcctcttgcaatttctttggatccttttcattgaggctatagcccaaggtattgagaccaattcccatgacctcacgcgcaccatcgtacatcatgatgtcatttctgtactcttcacgccagagatccgaccaatgttccggagcatttttgaccatcttcgtattgtagacgatccccaaggtgccccagaaataaggtacggaatattggttgcccggatcaaacgattgattcaaaagttttggatcgatattttccatccctttgatcttggattggtccaacttttcaaccagatgctcatccatcatcttggcaatcatgtattcactaggaatcgcaatatcgtaggtggttcccccttgcttgatcttagtgtacatggcttcgttggaatcaaaggtatcatattgcacctgaatccctgtctctttggtaaattccttgagcaattctggatcgatataatctccccagttgtagatgaccaacttgtcactattcttggtattcatgctcgcttcgatctggtggctaattccccagaggaccagaatgacaaggacaatcccagttaggaatgaatagagttttttcatgccgcttcctccttttcacgggtgataaagtaataaccgatgaccaagagcacactaaagagaaagacaagggcggacaaggcattgatactgagggaaattccttgacgcgcacgtgagtagatctctacagacaaggttgtaaagccatttccggttacaaagaaggtcacggcaaagtcgtcaagcgaataggtaaaggccataaagtagccggcaataatggctggtgtcagatacggcaacatgatctctttgagcatttgcacttgggtagctcccaagtcataggccgcattgaccatatcccggttcatttccttgagtcgtggcaagaccatcaagaccacaatgggaatcgagaaggccacgtggctagccagaacagataggaaacctagctggtacttcaccgtcgtaaagagaatcaagaagctggccccgatcataacgtctggtgctaccatgagaatgttgttgatggagagcaatggtccttctaactttttcttggattggtagatataaatggctccaaaggttccaatcactgtcgcaatcaaggctgacaagaaggccaagaggaaggtctctgataagatcagcatcaggcgactatctgcgaacaattcattgaaatgctcaagcgtgaagcccgtgaaggcattcatatctccccctttattgaaggcataaaagatcaaatagaagatgggaagatagaggatcagaaagacgaagcctagatagaaatgagatacttttttcatcgttctctcctttctctagttgcccacatggtaaagagcatggcaaggatcaaaacaactccgatggtagaacccattccccagttttgtgttgtcaggaagtgctgttcaatcgcagtccccaaagtaatgacccggtttccaccgatcatccgtgtcaacatgaagaggctcagactaggaataaagacagattgtacacctgagcggactccattcatggacaaggggaagaccacatgacggaaggtatcccaacgattggctcccaaatcatagctggcattgatcaagtttggatctaagtcatctaagacattaaagatcggcaaaatcataaaaggcaactcgatgtagctggctacaaagataaaggagaaatcggtaaagaggatctgctggggagcgactccgagaaagcttaaaaagctattaatggagccgttttgcccaaagattccgataaaggcataggccttgagcaagagattgacccaggttggcaagacgatcaacattaaccacaactgccggtgtttgagcagcgtcaaaaagtaagcagttgggtaggagatcaagagcgtcaccaaggtgacgattccggcataaaggaccgaattaaagctcatctttaaataggtcagattttgcgaagtaaagaactctttgtagttttcaagtgaaaactgcccttcaacgttgaaaaaggattgaaagatgatcatgaccacaggagccaagacaaagagaaaaatccacaagaaataggggaggataaatagattagaggttgttttcttcatctctttcctcctcaatggcattaatcaaaccagcttcttgctcttccacttcaacgtactcttcgatccgcgcatcgaattcttcttcggtttcattgagacgcataacgtggatatcttctggttcaaagtctagcccgatgacttctcccacgatggccttacgagtggaatggatcatccactcatttcccaaatcatcataggcgatgatctcgtaatgcacaccacggaagagttgggtgtccaccttcacttggagcttgccttcttcaggaagggtgatttgcaagtcttcaggacgaatgacgacttcaactggttcgtttggacgcattcccccatcgacggcttcaaagcgtttgccattgaactcaaccaagtagtcctcgatcatgcgcccatctagaatgttggactccccgataaaggtagctacaaagtggttgatcggttcatcatagatatctactggtgtaccagattgaacgatctctccttcattcatgacaaagatccagtcactcatggcgagagcttcttcttggtcatgggtaacaaagacaaaggtaatccccaagcgttgttgcaattcacgcaactcatactgcatgtctgttcgaagtttcaagtcaagtgcagacaagggctcatctaaaaggaccactcgtggttcattgataatagcccgtgcaatggctacccgctggcgttgaccaccggataatttttggatcgaacgtttttcaaatcccgctaactggaccattttcaatacttctgaaacccgacgttcgatctcagccttgtccacctttttcaaacgaaggggaaaagccacattttcaaagaccgtcatatgcggaaacagggcataggactgaaagacggtgtggacatcccttttgttggtagggacatcattgatccgttccccatcaaggtagacatctccagttgtcgcatccaaaagaccggcaatgatattaaggatggtcgattttcctgatccagatgcaccgagcagggtatagaacttcccttcttccaattcaaaattgatatcctttaggacaacggtaccgctatcttcaaagacctttgaaacatttttaaactcaataattggttttttcaattcacataaattccttctttactgcgattagcaaactgcttttcaaacgaaaatgcagcggctgacaggaagacctgtcagaccaccaatacctctcggggacttactagactgccccacctatttacggtatcgataggcactcaccccctctccgactgatgctatcgatggttcacaatcaattgttcttcaatacttaagctcttaggcttggccgataatgcgaacttctggttctaaacggacgcctgagtgagcttctactgcctcaatgacatgggcgatcaaatcttcgtagtccttagctgtcccattgtccacattgaccataaagccggcatgcttttcagaaacttccacaccaccgattcgatagcctttcagacctgcttcactgatcaattgacctgcaaaatgaccgacaggacgcttaaagacagatccacaagaagggtattcaaggggttgtttcaactgacgaagatgggtcaaccgatccatctcctgcttgatcgcctcgtgattgcctggagacaaagcaaatttggcagagatgacaacagcaccagtctcttgaatcttagaatgacgatagccaaaagccaactctttcgccgacaaggtttcaatttccccttccttggtcaagaccttacaagatacaaggacatgagcaatctctcccccataagctccagcattcataaagacagccccaccgacactgcctggaatgccactagcaaactcgaagcctttcaaactatggtgcaaggccacatgagtggtgtcgatgagtttagctcctgcttctgcttcgatcacataaccatccacactgatgtcacgcaagcgatcaaacataatgacaaatcccggaatgcccccatcgcggacaatgatattggacgcattgccaagaaccatccatggaatttgctcttggttggcaaatttgacgatgcgttttaattcgtattggttgcgaggaaaagctaaaaattctgcattcccacctacctttgtaaaggtataatgttttaaaggttcttgaaaacggatatcaatcccttcaagaatttgatttattttttcattcatctttctgtctgttctctctctataaaatacaaactattataccaaatttttaactatttttcgaccctaaaaaaaaaagaaggcctataatattcaggccttccttttatcatttactatgcaattttacgagcaatggcacgattcttttgtccatccagagctgatttgaccgaaatccaagcaccaccaagagtgaagacagctaacattcctagattcaagtaaaatttatctgggacgtcccctgagaatgtcgcttcatttagaagcgtccacgacataccaaatggcaaatccagttcactcataagcgccaaagtataatctaattggttgaccaaaaagacggtcaagaccatcaaaatagctgaaactaccacaccttttttagtcaatttcttaccaaggatctcataacctttgatggtacaataaccgagggcagcccctgctaaaacagacacatagccgagacgcgctactaagagggcaactgctccaccgatgattacaccgatcacagcccctacaatccctaaaaggaagttttcttcccgcgcttcataagcctcaactgtatcttgcacttcggcttggtaagctctaaaggtttcatcgtcgattaagaagatcgcatctccaatttgatacagaccaattggtccttcctcacccgtttgcgcattcacttgcacaaattggtggttgagtaagaaatcaacaatatcttggatagctgtccataaggtttcgacagccttccctttggtcattccacctttgacaacgatcgaggtcaagtaaccatcagaagagatagcattaatggcttttgattgttcttttaattcattccaaagaatttcactatcttcgatcaagtctccttcggaaccttgtttcacactgagtgaaatggtaaatacattcttggtttgagcgccttcaatgactaacaagaagccttcacgctctccatacatcacacgggcttcgccatcaaattgcagcccaagatcggtagcaatactatataaatattctggtttcatgtttccccctaaactttcgggaaagcttgagcttttccccatacaattctcattctaccataggagaagcaaaaaggacatatacattcgtatacatccttctttcatttgtgttacattgaggtttatttctcaacacgaacgccaaaagtgtcgattttaagttggaaaatctgaccttctagcccgattttttcaagagctacgacaaagtctgctgaatgctctggagctaagaggttcatgatcgttgggcctgctcctgacagataggtagcgtaagccccatgcgaatgcgctacttctttgacctgagggaactctttgacaagagattgacggtagcgctcatggaaatgatctgactcgatggagcgacctgccgtcaccaaatctcccttgagaagagctgcgatagcgacattggctacgctactagctgtaacagcttccttataagaccattctttcgggaggacattgcgactatcactggtcttcaattggtagctcggtacaaaggccacaaggtcacagcttgggaagtcagccgtgacatattggacgtcttcgccgatgtagctcgcaatgaccatatttccaaagatagctggagctacattatctggatgcccttcgatctcggtcgcgatgcgtaatttttcagcgtctgatagctggagcttggctaattggttggccaattcaatccctgcaacaatgaccgagctagaagaacccagaccacgcgccaaaggcacttcactagtcatcttgatccgatgaggctgcatatccgttgagatagaaagggctgttgagagcaagaggtttttctcatccgtcggaatccctgctccaagatcatgctcaatgaaccaatcatctgctggttcaaggacttcaatggtcaaatagcgagtcacggcaatccctacagaatcaaatcctggaccgacattggcactggttgctggaacaataattttcatgcttattctcccaagactttaaaggtattcaagagttcgaaattcgcctctgaatccaatttttcaaccaggttcttgaattgggtctggttgacttggtgggtaatgatgacgacacttgcatagtgaccatctgagtcttcttggaggatttgcttgaaggaagctccttctgcattaaagatctccgcaagacgcaagatttgaccagtcgcatctggtgccttgattgagaagtaataattgttcttcacgtcttctggtttagccaattgaagagggcgactgtattcattgaaggctttaccgattgttccttcttttagtcgacggacaatgcgaacgaggtcggctacgacacttgtcgcagttggtttttgaccagcacctggtccatagtacatagactcaccaataccgatggattccacatagaccgcattcatgacatcattcactcctgcgagtggatgttgttttggaaggaaggttggtgttacttctgctgcgatccctgactctgtttcaacgatggagccgacaagcttgatgacatatccaaggctttgagcaaccgatacatcttgaggagtgatttggctgattcctttgtgacctacttggtcaaattggatattcattccaaaagcgaactggctcaagatcaccatcttgtaagcagcatcgattccttcaacgtcgttggttggatcactttcagcgtaaccaagacgttgcgcttctgctaaagcatcctcataagtccagccttcttcgaccattttagtcatcataaagttagatgttccattgaccacaccgagcactttagtcaccttgtcggaagcaagggaattcaccaaggtccgaaggattgggatcccaccagctacggctgcctcataataaagagccacttggtgttttttagcaatctctagcaattcgcttccatggacggcaagaaggtctttgttagcagagaccacgtgcttgcctgcttccagcgcacgggtgataaaggtcttagctggctcgatacgacccatcaattcgaccacgatggcaatgtctttgtcttcaatgatctcatcgacattggtcacaaagttgtagtcatgacccgccgcttgcaatttttccttttccgcatcatctcgaaccaagaccttagcgatctcgatttcatcttgagctgcctgggtgattttttcatggttttcttttaataaaaatggtacgccactagcaacagtaccaaatcctagtaaggcaatcttaacagacatcctattgactccttgaattttctatagtagctccattataacaaaaacttgagcgtttgacagccaattgccttaaaaattctgaattttcatgacaggatctgcctgtagcaagttctggaaaagaacatagaatttgtggtacaatatagaaaataatgaaaacggtgacactatgagtaaacgaagagtacctaaaaaaatcaaagccctacttggaatcaatgccttcctactggtctgtatctttatttgtagctttcttctgatcaaacggatcactcagccgagggacgggaataccagtggcactgccgtgacgcgttctctcgaggaaggtagctcctctatcgagtggactcgggtgaaaaagccggtcaaactgcccatcctcatgtaccactccgtgcacaatatggccgagtccgaagctgccaatgccaatctgattgtcgatccagagacctttgaaagccaactaaagaccctgaaaaaagcgggttactacaccctgacacctgaggaagcctatcgcatcctcgccaagaatgaagtcccaaaaggaaagaaatttgtctggctgacctttgatgatggcgtcgaggatttctataccatcgtctatccgcttcttaagaaatacaagatgactgccactaacaatatcatcacggactttacccaaaaggaaaaagaaaatgtcctgacctttgaccaaatcaaagagatgaaaagtgctggcttgacctttgaaagccatacggttaatcatccagacctagccaattccagtcttgagacccaaaagaatgagctggttgcttctaaacgcctgctggataaggtgctggatcaaaataccagcgttatcgtctacccatctggtcgctacagccaggtcacgatcgatcaagccaagaaagctgactacaaactaggcctcaccactaaaaatggactcgccagttccgctgatggcctctacgccctcaaacgagtccggatccttccaaccactacaggagaggatctcctaaccatgatccaagaataaagaaagagagtgggacagaaatcggtaattcgttagaattcgatttcgtcgtcccacctccgcacagttgagtagggctttaaaagctgatgaaatcagcgtagtagagcccactcaaccactgcgtcttgctcaacaatccaaaaataattgagaggctaggacttttgtcccagcctcttttgttagagttccttctctagttcttttagaaaagtgattaaaaattgatggcggctttctgctatttgtttggcagtctccgtgttcatttcatctttcaagaggagcaacttgtcatggaaatgttggacagtatcagtgagggacctccctttgtggccaccataggaaaaagttcgcgcaattcctacagctcctatcgcgtccaggcggtctgcatcctggacaattttgccttctaaggtttctggatgtttcccacgatttttgctgaaagaaacagcattgataacccgacaaatctggtcgatttggtcttgaggaataccgatctcttctagaaacatgcgagcattcgcattattttctgtttgaaacaacttagcatcatcagcatcgtgaagaagagctgacaagcccactatctccagatcacatggaccttctgcttgtgcgattctcatcgcattggtatagacgcggagggtatgctccacatcatggccatccgctcgatcagcaaataaggttttaacatactgcttagtatcttggattcgttcttcgatcatcgttcttatcctttgtacaatctgtgctcagttttatctattcatatgagctagttatggagaggggcagtttactttaaaaccacctctcggtggtgtttactttttcttttgtggaaagaggggtaggcctagggtcgcgatcttctcagcgggaatcttcatgccatccttgatccatttggagatgacagagacaatggctgagctccagaaggaattgaggtagctgccagcgccattcgaggagctgccattgcgtttttctaaaaagtcatagactgccttggtcaagagtcgctcaaaattataatcaatggccaagctaatgattttggcttctttcttgacttccttaaagaggtagacccagacttggtagaggtctgtcttgaaattgtagccatctaaagacttggtaatctttgcgatactagattgaaagatggactctagaatctcttccttggagtcataattacggtaaaatgctgctcgagagacacctgcacgttgaaccagctcagatatggtgatctttttcagatcttttttctccaacaattgcaggagagagatttcgatggattctcgtgtaatcgcattgttttctcggttaaatcgtttgagattttccaaggatttctcggatatttttctttctgccataacatttactttctatctgtctcacctgatgatatctgcttggatagcattgtacttcatgatataattgtaaaagaagacatactacttgtcaatgtacatttttatacaattatgaggtatgaactgatgaaatggaaaattattgcggattcaggctgtgactaccgctctttggacaatctggcaccggacacggagtttgtcagtgtcccattgaccatccaagtgggtgataccatctatacagatgatgctcagctcaatatcgatcagatgatggaggagatgtatgcgactacgactgcttctaagtctgcctgtccgagtcctgatgactacatgaagtcttttgaaggggctgaaaatattgtcgtagtcaccatcactggaaccctttctggtagctacaatagtgcagaggtagctaagaaaatttatctagaagagcatccgaataccaatatccacgtcattaatagcttatcagctgggggcgaggtggacctaatcgttcgcaagctcaatcagttggtcgctgaaggccttgattttgatcaagtggtcgatgtgatcacgacctaccagtctaagacgaagttgctctttgttttggccaaggttgataatctggtaaaaaatgggcgtctcagcaaattgatcgggactgttgtcgggctcctcaatatccgtatggttggggaagctagtaagacgggtactcttgagctgcttcaaaaagctcggggccaaaagaaagcgatcaaggcggcttttgatgaattgatcaaggcgggttatgcaggcggtcatatcaccatcgcccaccgcaacaatgaaaaatttatcgagcaattctctgcattggttcgagaaaaatttgcccatgcaatgattgaagtccttcctacttctggactttgtagtttctacgccgaagaaggcggcctcctcatggggtatgaaatttaagttaccactaaaaagaggctaggacaaaagtcctagcctctcaattgtttttggattgtcgagcaagacgcagtggttgagtgggctctactacgctgatttcatcagctttacagccctactcaactgtgcggaggtgggacgacgaaatcgaattctaacgaattaccgatttctgtcccactctctctttttattctccgatctcttggtagagggtacggatttttttgcggtagatggtatagctgatccctgctccaatcagcagtatgacactataaaggatcacagctagcaaggtgctgacggaatgataggtccaaatgaagctgacaatgatcaagagaaacatcacaaagagaaagacaatcaagagaatagactgaagaactgcattcccacgatgacgggtcatcaactctgtgatattggtccaattggtgctaaagttctgaaaatctttgacatagtctcgaatgcagatcggaatagtggttacaacccagatcagcaacatggctaggatagccaagggatggacgccaaaatagagacaaacgccaactagaagaatgacaggaaggatggattgcaccagatagagcaaccaaaacttcataaagagatagcgtttgaaatcaatagggagcgatctcaagtactcaaagttttcgcgctctagcgaaataccgatactggtcaagcctccaaaactattgaaaacaccaatcaagatggcaacaagggtcagtggcaccagatactggggcgtcaagtaaggactgagtcctcctatatttttcgatgctcctgctgctccactgaggaggaaaatatatggcagaatactcatcatcaagaggacttgcaccataagggttccatcgctcaagagtctgcgatgatactgaatgacaaatcgtctaaaggagtctttctgacccacatggagcactctcacgcgctctttgacggtttggttggtcgcaactgcaagggccgcatcataaaactgcggaatcacgattttgcgaaccaggccaatcaagaccagaaggaccaggatccagcccagaaggccaaggattgcttctccatcaaaaggatggaggatgaactgatgaaaggccgtaaaaggtggaaatagaatgggaatatctgcgccccccgtcacttctacccgatgggtctgaactagattcagatagagataagctcctagactcagaagagaaccaattccgaccatgatgttggagaccagggtcgtgtgttttttgaaaaacaaggtcttggtgatcaaatgagctagtaatatcgtcgctaaaaagagaacgcctaagagaattaaggcacaaaagaggcctagcaggatccctaacggattaaagccacctgcctgcacagggaggatcagaaaatagctgatcaagggaaggatagccatgagaagagtcaggatgaccgagatgctctttcctgctatgacttctgcatctgagaaggcatagggcctgtaaaactggaggtccttgctttcataaaagacattgtaaaaactcataaagccttgggaaatggtcatcaaggaaaagagggcgaccatattgacaaagaaggctggttggttcacaaaatcatagatactaaagagcaagccaaatatgaggaaatagaccaggcctaaaaagacatagttgagcaccgatttacgggcaacattgagtttgacgtccggttttttggcctgtttggcacgtaattttgcgatctgagcgggctgactggcatagatgatattgacattgaccagttgctggataatcttaagacgcatgatcgccaccttcttccttccgacccgctagactgagatagatactttccagactttgttcgggatgttgtcccttcaattcctcaatcgtcccatagaaaatgagatttccttttttgagaatggcgattttatcacagagttgttcagctacttctaagacgtgggtagagaaaataaccgtcttgccccgatccgcatgctggcgcatcatttgttttaaatcgtaagaagcctgtgggtccaaaccggtcatcggttcgtccaagacccagatatctggatctgacaagagtgctgcaatgacgaagaccttctggcgcatcccatgtgaaaaggattcaatcacttcatagcggtggctctgaaaatcaaagatcctaagaagctcctctaaacgttggtcacagtctttctgactcatatcataagaggtcgcaaccaactcccagaattcattggctgtgagacgcaagaaaagatctggcgaatctgccacataaccgatcttctttttgatcgccagtcgatggctatagaggtcctgaccatccacttcaattgatccagtggttggggtgatgacactgaccaggctcttaatcgtcgttgactttccagctccgttgtgaccaatcaagccgacaatttgtccatcttcgatggtcagatccaagtggttgagggcaatgtgcccatcgtaatctttcgtaactccgtgaaatgtaatcatgttaactccctaattgatcctcgttgggaccgtttttcttattctgttgataagcgatcatcgaaatggtagagcaattctagcagatagtttggaatggtctccaagaagtcttctttgtagacccgctctcctcgcttatgcaattctttaccccatggtcctagattaactgctggaacctgaatttgagcaattttttccagatccagatcatagacctgggctggtgtggctaggctatctaggacgacttgataagaagccacatccttttccaaggcacaataactggtgtcgttaatccccataaagtattcttcgacttttaagaggtaacctcttgtgtccagatactcgcggtaatcagtgatgagggacacgatattgaaatcagtattgtctaaaaagcggcagttcatggaaggataatatgggggcgcaaaaccgatgaccaccataggatccttatctcctagaaactcaaggagtcgctggatttgctgaatcgcaaggctctggtagctggtcccattacgaaaatcttgctccgcttttttattagaagcttctctaaaggcttggtagccctctaaggcttggcaacgttcctctagttcttgataggtgatgactcttggccttgcaataatatggtcttggccagcctgatcctgcaagtgctcgtacttcttgtaaaaggcgtccaaggcctcttgactaagctcatagattcgttgcaagagctcttggggtgttttcttcaaatgcaacacactgaaataaccagccgcataaagcacggtcgatacatcgtactgctccttcaaatctctgagataggaccaagaaggaaggggggacgattctcccagcgcctgatctgccagatcgggatgaagatccagctgacttgcgatggctactaagagggacaaggcattgatccctttaaggggctccttcatatgggacaagacgccttgcgccacaacgactggcatgagtttgccgactgtgccaatgtgaaggaccttttcttttcctacttccgattcaaagggttctgaatccactgctaatacataattcagatcaaacttttcctgcaaatctgtgaggaggcccaaagctccccgcatcccacgtgaataggattcctcgtctccaacagaaagataaagcaggttgacctgacctcctgagggatctgccgcataggcttccagaacccccaattgaagggctaaggctgctttcatatcgcaagaccctctgccaaatttccattctccagaagctaaatcttcctgcatatcaggtcgactgtccagtcctttcaaggcttctgctactttatcagaatcgagagcgatttccgacaaatttccatagtcttctagatcgactgtatcatgatggtggaaaaggataactgtttttttctttcccttatcaaccaaggcccaattgaccgaccgatgcaagtgatcctgtggcacctgatagcgcccaaagtggtccggatggtccttgaaataggggatctgtccaatccgttgatccaggtaggcttcgatcccttgctcagtctcagtattggtgaagctcggagtcgccaaggcttcggtaaaaatcgtttcgatgctctctctattggtggttttcacttttctccatccttcttttctattattcatctttgtgagctttgccaagtgacaacaggctggtgagcatgagtcctaggaagccaaagagagtccaagggcttgctgcttgacctgtttttggaaggcttggttggcttgtcacttctatcttgtctttgtcagctctttgagccaattcttgcgcagtttcttctttttgttccttacggaagtccatcggatcccgaccgtggctttgtttttgaggaatttcagaagtagctggattggttggagtcattggattacttggaacaattggtttttctgcttgatctactggacttgggtcttgttcaggatctacttttggttgaatggttgcaattggcaagatccgatctgccaatgacgcatactctgtatctttttcactcggttgataacggaacaagagtgaccgactgttttcaacgattggaatcgttgcagaaatagaatcagtcttgaaggtcacttcataaggatctgcaaaatagatgtaatctggatcataggtgtgcaaactcaaaaccagtcgatggccttttttcactgtatagagatttggttgcagatacatggtgtaatcatgatattcattttctttcagatcaatagaatgactagaacttgctgagtcatagcgagatgctggattagctaaattcatccaaccacgtgcaatcaccacactcttaaccttgtgggtcttgtaacgtttgagaggcaaggtttcaaggttgctaccattccagtagcctgtctcatcgatggtttccttgtctaatgtgcgtgtgctataaccgtctttatcataggtgatttcttctttgaccacatcaaagtcttcgtctgaaacatccatcagggtcgcactgacatgggcatggtttttgtctcccttgacaaaagcagcgctaaaatgcacagggatatggcctttaatggtgacatcttgatcaactggtgctgcataggaagccgctacttctgaggaatggaaggccgcatcttggttgcgtgtggtccagttatttcccgtaccatagtaatccccagtcactgtcacatcctcccgtttggaataaattcgagcggagatggcattgttggtatcccatttatcaaaacgacgccatttacttggatcaagattgtcctgagctgttacttgtggaaggttttcaatcccattttcaataccatagaggtaatggctataccagagattcatcaggtcattaaaggcttgacctgcgacttcggttcctgaccaacgagtagatggataaacgtgattgccctggtggagcaagaccttggcatcgatccccgcctttttataggcttctaacatgagttcaaaatgtttgggtttgacattgtcatcattgagaccttgaatgatgagaggagccgctttcaagttggctgcgtttagcgtgtaatcgcgtttggcatattcttcgttgtaattatgaccatccttgtgttggagctcattgagcttggtgatataggctgcatagtaatccttgaccttatcccaatcttccttatcaaggattcggcctgaggtatagacagatagccaagataggtcattggaagctcctgtatccagaggagatccttggctgttgaaatggtcgtaccaactagcaatccctgcagctggcacaatggtcttgagaccttcaacaccagtagaagccacaccaaatgttgtcgtacctgcccaagacaaaccagtcatggcgacatttccattggaccaatctgccttaacttcatggttactagtcttatctgagtaggctttgcgtttgccgtttagccactccacgatatttttataagctgcgacttcaaggtcagagccggtcgtattgatcccgtctgatccttttgagcccaagccactgctggtcaccactgcataaccacggactaagaaataattgtaccagttgagattttcgtaatcataatgcgtatagtcttcagagctttcacgcggattgacatagtaccaatcctttggattggtcgccttggccacttcctcagtcgtaacggtcttggttgcttggcgtttggcaggtttttcatagagcttggccatatcgaagtttccaccttctttgagaccaattccctctaaggtacgctcttctgttgttcctgttacataaggactagcttcaaaaatggtcgcagctttatagtccccattgacagcagcttttggcacctgcacaaaagtcttaaccaagtcaggcttgccgtctccatccgtatcataatcggtttccacatagacaatatagcgaactatgtcactcttgtcataggagtaatgctccggatcgtctcctggcgtaaatgggaaaataggttgtgctttgccattcaaaaagagaggagtcttcttgtctgcgcggtaagcagcacggagctgtttggctacatcaaccatcgaagtaagattagtaactggagcagaaccctccactccttccttgaccatcccaaggctcttagcaaaagctaatcggtctttatcagtagatccgacttggttttccttggtcgaagcccagttcaagagttgattgactgcctccgtcaccgtaacttctttttcacgatcctggtcggttacagttgcacccgtaattttagccaagtctccttgggttacttttggagtcgcgctcacctcttgactgcgaacggtaagtgtcgcagattcagggcttgactgattggctagagtggactcaacagttggggcgctcactaccgctggacttgatgcaggttcttcctgtagctcaggtgtcggagcggttggtgaagtggttggtcggttagtttctgaaacctcttccacttttgcaggctgaacggtttctttgttgtctccttgtgttgaggtcactgtttcagtaacttcagagcttgtcgctggaggagtcaccgtctcctcagtagttgtgcgacttacttggtctgcttgcacatgctgggcaagtacggcaggactaatcagtaaacctgcaacgagtagagaaacaagagttgtttttttcataaaatggtctcctttcaccattttcaaagtcagtcctagcggagcccgactctattattttatattctcacttcatttctttcatgtatgcgatttctttttcaggaagggcttgtttccagtgcaaacgtttgtcctatccaactatttttggtaaaataaggacattcacatgaaagaagaaataaaaatggaaaatcaaaccttaatgcaatattttgagtggtatttgcctgctgatgggaaccactggacgcgtcttgctgaagatgcgcaacacctagcagacttgggtattcgcaaggtctggatgccgcctgcctttaaagctacttctaacaatgacgttggttacggggtctatgacctctttgatttgggcgagtttgaccaaaaaggaacggttcgtaccaaatatggcttcaaagacgattatcttcaagccattcaagccctcaaagatgcagggattcaaccaatggccgatgtcgttctcaaccataaagctgctgccgatggcttagaggaattcgaggtcgttgaggtcgatccgatggatcgaaacaaggttctcactgagcccttcaccattcaaggatggaccaaattcacctttgatggtcgaaatggcgcctataatgacttccactggcattggtaccatttcaccggcactgactacgatgcttcacgtaataagaatgggatctaccaaatccaaggggacaacaaaggttgggctcatggagatctggtagacaaggaaaacggaaactacgattacctcatgtatgccgatatcgatttcaaacaccctgaggttgtagaaaatctcgatcagtgggctgaatggtttatcgaaacgactggtgtagaaggtttccgtctggatgcggttaagcacattgactccttctttatgaagaattttatccacaatatcaccaaaaaatatggagaagatttctacgtctttggtgagttttggaatggggataaagagaccaatgatgaatacttggaaagcattgactacttgtatgacttgatcgatgtggccctccaccaaaatcttttcagagctagtcaagaaggtgaaaatttcgacctgcgaactatttttgacggaacactagcactgaatcatcctgaagaagctgtaacctttgtggacaaccatgatacccaacgagggcaagccttggaatctaccattgaagaatggtttaagcctgcagcctatgccttgatcttacttcgtgaagctggtttgccttgtgtcttctatggagactactacggtatcaagggcaaatttgcgcaagaaagtttccaagaggtcctcgatcgcctcttatgggttcgtaaagatctggcctatggggaacagacagactacttcgatgaccccaattgcatcggttggacacgttcaggtacagaagaaacagcaccaatcgcctgcttgatttccaataaccaagctgctgcaaaagtcatggagatcggatcatcctacgcaggccttacctactatgatgtccttgaaaattgctcagaaaccgtccaagtccaagaagacggtactgccgaattcccggtggcagagcgctctgtcagcgtctgggtagcccaagatacagagggccaataaccaataaatgtgattttctcctaggatctacatgttcctaggagaattttttcctgtaaaaattttataggaaatacagcttcattttagcattataagaaagcgctgtcaatgggtatcgcgtctatttgaaagaaataaagagcataaaaaagctcgttttccagtttggaaaacgagtcttctttttagctcaattctgcaatgatttctttcaattgcgctttcgtatgaactccagcaacttgtttgacaacttgtccatcttttttaaagagaagagttgggatcgacatgataccgaattgacgtgctgtatttggattttcatctacatccatcttacagattttcaaatcatcttcatgtacttcttctgccaactgatccaaaattggagattgcatgcggcatggaccacaccaagttgcccaaaagtcaatcaagacaagtccttggctggtttcttgttcaaaagttgcatctgtgattacgtgtgccatatttcctcctttttcagtagtgactactgattctgcatttctacttttattttacactaaatgatgccattttagaaatatttgctacggggactccttaggcatcttctctctttttgcgccaaaagatgagactagaagctgtaaggctgatcacaccgaagagacccagagcatgatctttgctccctgtttgaggaagcatatggtctgcttgttctcctcctactgcagaagtcacttcttgaggatcttctgtaactgattccgaagtcgtggtaacaaatcgagacccataggatacagctagtgtaagatgaggttgctcttgtcttgctgatcctgtttgcatctgctcttctttttcaggaacagtttggtttggttggacaaaatattctggacttggaagtgtatattcttccttgtagtggacttctggagcgactagagcagcacctttaacttctggtaaattcgcatagtcagtatctcttgcacttggtacataggatgccttttgggcgcgggtcttttcaacaattggaatcgctgcctggatagaatctgtcttgaaggtcacttcatagggatgctccaccgttaaatcagatgggtcataggtgttaaagactagggctaacttgtgacctttcttaactgtatagagatttggttggagataaaccgtgtaatcgtggtattctcccaccttaggctcgatgctagcgcgtgagcttgctgaatcgtagccagactcagggttcgcaaggttgatccagcctttcgcaatcaccttgtacttggtcttgatggtttcgtattcggcaacagataggttgcttaaattgcttcccatccagaaaccgtctgctgttttatcttgcttgacgctaccatttcctaccacgtcaaagtcctcatctgccacatctaccaagagggcgttaatttggaaattctttccttgacctttggcaagagctgccttgaaatgaacggggatgtggcccttgatcgtagtgtcctcagtaacatcagaaacaaaggtcagattggccttagaggaggctttgctgacggtttcattacggttagcgatctcaacacctgcagccgcataatcactagaaatggtttcttctagacgtttcgagcttgcattcaagaagagacgttgactactcttccagttatcatagctggtccacttgcttggatcatagttgttttgagctagaaccgctggcaagctttcgacgtgattgtccactccatagaggtaatgggtcagccaggtattgagcaggtcataaaagtcctgaccattggcggtgatgccgtatccccgtgacatagccgctggatagacgtgatctccttggtggagatagagcttgacatcttgtcctgctttcttgagggcatcgtacataagttcaaagtgtttggtcttgacattgtcatcattcaagccatggacgatcagggcgctggtcttgagattttctggatgaagggtataatcccgctccttccagacatcactgtagttacgatcatgggcgtactggtccttgttcaattggttgatgtagttggaatagttttgccaaatccctgcccagtcgtcttggtccagcatccgcgtgctaacgtagagggatagccatgaaagatcactataaggcgcattgctaaattgggttccttggctattgaaataatcataccaagaagcaatccctgctgctggaacaatggtcttcaatccttctacgcctgttgccgccacaccaaaggtcgtggttccagcccaggagagacccgtcatagcgacattacccgttgcccagtcggccttgatttcgatattgctggtcttgtcggtgtaggccttgcgtttgccattaacccattcgatgatattcttgaaggcattgatttcgagatcagatcccgtcgtgttaaatccttctgatcccttggtaccaagtccagcactggagataaaggcatagcctctgactaagaaatagtcgtaccagttcagatcttcgtagtcatagatatactcgtagggactgtagtaataccaatccgatgccttggcttttttggctgcttctactgttgtttcactgcttactggctgtctctttgcaggttggctgtgcagtttcttcatatcgtagctaccgtccgttggaagccccaaactttcgagggtcacgtagttttcatcgagcgtccccgctacgtaagggcgcgcttcgagaatagtggctgccttaaaatcgccttgcgctactgcttttggtaattgaacaatggctttgactaagtctggcttgccatctgcatcggtgtcatagtccgtttcgacatagactgggaaacgtacaatttggctgtcttcatatttatagtcttggtctgctttttctcccgtcgtataagggaaaataggctgggcacgaccatttaaaaagagcggacgtttcttttcagccctgtaggcatcgtagagtttcttagctgtttcatacatcttggccaattctggctgactaaccttacggcttagatcttctgacttttcaatcaagcctaaactcttggcaaagcgttcgcgatctgcttggctttgacccaattgactaggatctgttgctgcccattgaagcaagccattaacagcatcttggactgtcaactctttagaggcctgatccgctgcaagggtgctacctgtgacttttgccaaatcattacttgttgccggagcttctgaagtaggagcggattgaggtccagcttccctgtttgttgctgctggagttgctactgggacagaggactcactttgtcttgtgtgttcttctgtagcaggtgcaactttatttgcaactgccgtccgatccagcgatccctcactcgagcttgctccttcttcactagtggcagtactggtgtcacttgctgtcggtattgcttcagtagatggagcatggaccacttctgtcgatggggctaactcttccgtttgttcgtctgctgctgctacttgatgcaagaccatcggcgcgatcagtaagctcgatgcgacaatggaaaccattgttttctttttcatgtcaatctcctcactttttgtaatcaacactcctattatactatgtaagcgtttttagatcaaacagatgttcatctgatccaaaaaaaaaccgaggcatcagcctcggttatcgatccttatttgacgtgtttcttaagatcttcttgtgcttttttgtttgactctgcttgttctttttgccatttttcaagggctttgttgtagtcagcagttgtcacagctttatcttggagtttcattcctttgtagatcacgtggtcttttcctttaccaccagtccatgcaaatggagctgagaatggttcgatacgtgtcaagaatggacgtcctgttgatgaagaagttggcatcacaagggcgctatcagtcaaccaagcttgcgctgccgcatatttttcgtagcgtttgttgacgtcttgtgtttctgcaccagcatctttgatcatcttttcaaagtcgtacagaccaacttttttagctgcttcattgttttcacttgggtcaaatccaaggaaagtcttagtattttcaccagatgaagctttcaagatatccatgtaagttgatgggtcttggtagtcagggctccatccaacattatcagagagatcccagtcttcgccggccgcatttggcgcaaagagggtcacattttgaaggtcttctttcgaaagcatttggatatcgatgacaacattttctttaccaagcgcttcttcaactgattgtttgaaagattgcgtccgttgaactcttgatggagtggtttggtccacaggcatatcgatgtgaattgggaatttcacaccttctgcttccaaggcagtcttcgcttttgcaaactcttccttcgctttcttagcatcgaagagaccgttttgaccatcgtctagtttggtagatttccactcatctccgtaggtatccaattgagttttcaccatttcaccgaaggtcttaccatcagcttggacaaatgttggtggaatgtagaggttacggatgatcttgcttgctccgtcttttccgttcaattgagcagcatacgcttcacggttgaaggcaaagctgatcgcttgacggaagtccttgttcaagagagctttcttagtagattgtttttcttcatcggtcttcttagcagtgtgtttgtaagattgacggtcgatgttggtaccaataacataagaagcggcgtcttgaggagtgtaggtgatttcgtctttgaattctttggcttgctctgagtaaccagatccagttgggaagagttttgccaagctaagagcattttcaccgaatgatttggccaatttactttggtcttgtccatcgtagaattccaatttcacatctgagatgtagaccttgtctttatcccagtagttttcattcttggtcatttcgatagaagattttgaagtaaagctcttcaagatgtaaggaccattgtaaagaagagagctggtgtcacttgcttgggcgaatttatccccttttgatttcacgaatttttcgttaacagggaaagtgatcccaagagtcaatttagagttccagtaagattctggttggttcaaagtgatttgaagggtatgatcatcaactgcttttactcctacagctgagaaatctttatttttaccgctgacgtagtcattcaagcctttgatagaatcttggatgatgtagagcatttctgatttgttatcagccgcatatttgatccctgtgatgaaatctttagctgttacatccgcatactcttcgccttctgaatcataccatttagcatcatcacgaagtttataagtataagtcaagccatcttgcgaaactgtccagtcttttgcaagagatggaatcaagttaccgtatttgtcattttcaaacaaaccatcaatcaagtttcctgtgatatcgtgggttgctgctttaccagatgtgatatagtttaggttttctggctcagtctcatagacatatgagaatttttgaccgttgcttgagctagatgatttagaaccacccgaacaagcggctaggatacctgctgaaaggagggcaactcccgcaagtgcaatgacatttctttttttcatgtaaaactccttaagaaattttaagtttattttaagattataccacaatgattttcagaagaaaaggaattttcagaaaattttagtttatgaaaaaactactccgaagagtagttccaatttttaatctactaagtcgctcttgaggtaggcatcgaccatgcgctctgttgcgactacagaatccaagtgagtccgctcatatgagtggctagattcgatccctgctccaagaagagcatgtttgacttctgctcctgcgctcatggctgcagaggcatctgatccatagaaaggatagatatccaacttataagggatttcttgggcttttgccaaggctaccaaatgctgacggaattcgtagtgatacggtccagaagcgtctttgacacagatggataccgtgtattcatccgtcgcttggtcatctcccatagctcccatgtccactgccaagtattcgaccacttcagctggaatactagaattagccccatgccccacttcttcaaagactgaaaaggcaaaggtggtcgttactggcaattggatctgttcttccttatacacgcgcagaagattcaagagaatcgccgcactcaccttgtcatctaagtgacgagatttaataaagccagtatctgtcacaatggtccggggatcaaagctgacaaaatcacctacttcaataccaagagcacgggtttctttttcgttagttactttttcatccagacggacttccatattatcctgggtccgctcgacagtccctgcatccttgtagacatggcaagaagtctgatggaccaaaatcgtaccagaatgggtctttcctgtattagccacatggactgtacagttttccccttcaatcatattccaagggaaaccaccgatacggtccagcttgaggcggccatctgctttcaccgcgcggacaatagcccccaaggtatccacatgggctgtgacgtagcgttgcttgtctgtgatcacaccaggaatggtcacattcaccccacccttagcagtccgagttacttcgtacccaaagccttcaatggttttgaccaagtagtctgcgatctcacgtgtataaccggtcggggaaggaatggctgtcaattcctgcaaataagtcactgtctgattcataatgcctccaaatatgtttttctttattctagcatgaaatggggggaatagctagaggagaggtttagagggtgaggtttttcaactcttcccgtacttgcattaagagaaggcctagcttgttcttcccagaaccatctcccccatcagcccagtaagcctcatttcgcgtatgttcgatgatgatggcatctcctgtcgctagcggttcttttgcgatttcaggattttgactaaatttcatccgaagtgcctaaagcattacctcatctttgatctcttcccaatctggtctcaagggattttgacgattgcgtccctccaaagcagcatccattggtgatgctatctaacgaattttctcttgaatttggggtactaatacagtatctgatgacaaaatgctggctttatcttctgcttgtttatcctctacaagtttagctgcagccaattcgatttctttgcgactttgtttagcagtagaatgttgaccagcagtatatcccatcatgaaaataaagctagttgcagctactgttccaacactaattaaggctttagttttgactttatttaacatcttagaccttctttctataaaaactaagtcaagaatactagataaagctagaaaagagtatcacagaagtaaaaatgccacccgaaggtggccaatataacttacaaaattagtaatccgtctgataaattattttatacaaaccatttttcagataccctagacataatgatttcctccttaattactaatagattatcaaatttactgtttattagaatgagtaatatgtgcaatttttgtaaataaattaaaaaagctgcatcttctgcaactttttaatctggtggaaaatagcccaactgctcagcgatgtgaatcgcctcctgcctgttaatcactcccaattttgaaaagatattggccaagtgattggaaactgtacgtttactcacatagaccttgtcacagacatcatcaatggtcaagccatttctaaccagttctagtatctcgatttctcgtggtgttaacacctctaccattacttcatctgaaaagaccttaccacctagataaatcttttccagttttttcaccaactcatctgggtccatacttttgtccagaaagccataagcccccataactttagctcggtgttcatacatttttttactgtaacctgtcaaaatcacaaccttactagaataaccattgtcgataatctcttgtgccaaggtcagcccatcatcttgatacagactcgtcaggttgatatcaatcaaaataatgtcgtagtcattaaaagtaatctccgaaatagtcgaaaaatcatctactaactggacctttttaatgttttccgataactctaaaatcatcttgatactttggctaaataatttatgatcatcaattaataaaattttcataacacaactccttatcaatcgggagagtaatttctacacgaaatctcttattattttcaaaaatctgcatttgaccacctaaaacactaattttattagacatatttttcaatccataacctaaggatttttctgtttgaaggcagtcattttcagaaatgataaaaatagcgtcatcatgcacatcaatcttcaaagaaatccttccaccactagcgtacttaacggcattggtcgccaactcctcaaccagacgataggcaattttatcgtaaggagataaaagcctaaagtgggcaggaaactgtgtgactacttcattttctgcgtgatagcgtttgacaatccgattaatcagcccttgatactggatgtctaactgttcgtctgtttctaccattggctgataataatccatccgctcacgaatccgctgaaccaactcctctgttaccagattgatctgttcaccaaaagcttgattgctactatatttattgaaattttttattgccataacattttgcaggatttcattgtgaagaaattcggagaactgttgttctgtatcttcatttgccagcagatttttcaccatacggttacgctttaaaaagagaacttttacataatccccagaatctagcatttcagcagaacgaaagaggcgaatcaattcttccgaacaaatcccgaacaatagtaacatgatattcaagaccaaaaagctcgtgtttaaatctagacgaaagatgatgaaaatgcctactaacaaaaacataaccagtaaaaacaagcgtgaaaaagcttttatataggacaattttaactctgatacctttttttgaagagagctgataattgttttgaagtgtaaaaaagctaaaatgccaacaatttccagataccagactaggttcatcactcctgagcccctcgtattgatatacaaaaagaaataagaaagaggcaatatcaaagctaatatccacaaatttcgtctctgatacttgagtttacttttcaactctttatgatataaaatcagtaaaatcaagggaacaaggtttaaaaagaaagacgcaaacaaggacagaaatagaaaaattgaaggacttaacagatatgaactaatggtgattagtgtcaacacaaaggacacactcaacagttcttctcctattttctctcccagaaagataatagacagagaactatacaccaataaaaaagagttgagcggatgaagaatatcaaaaaagtgcaacagggtactcgcaactccttgattaaatatggattgccagctaatgagaaacatcatcaggagcaaccaaagtttcaactcactataccgaaaggtcacaatattacaaatatagctaaatacaattaaagcaataatcagcaataaaaccatctgcaaggaaaaatctgtcgaaaagtccagagggatcctatgataaatataaatcattaaagctagatgattcaaaatcgtcaaccaccacaataaaagtgagtttttcgagaacaatttgacaaactgtttcatatgtatctacttcctgaactactttaatattattataacacaataccagaattgcaggataggcaactctggtatttgacttaattttcaataatttgccaacttactctgtaagtcactagcaagtaaaggacaaagagtaaaaccgctactcccagataggtgatatcaatagaaatgctggtattagcgaaattctcaaaatagcccaaaagagcggtactcaaggcaaatgctagcggacctgcgatgaccagcggaaccaagaaataacttagaatctgttgcaaaagaatagagcgattttgcttcctcttattcccaagaagatataagatttgataatcattgacactatccaaagcacttgtagaagtttgaagggacaagatactgagggaaataatgataaaaataacactgacaaaaatcatgacaaagacaatgacgcccataaatccaagataaatctcaaaaattcttcctttggtttgataggtgaacggattcaactctgctccatcacgagtgaagtagtatttttctatccactgacttaagaatgtttctactttccgtttgtcgatattttctttgaaattggcaacataggtcgtgtggtcttccgtcaatccaactactaccctatctggtacaattaaggttcctgtgtcatttgtacccactgacgataaaaagtaaactgtttcaagtggctttgaagacgcaagattaagagaataaccgttaatcatgagggtttttgtcgttaatagaaagtcctgaatctgcttggcagttcctttatagttagcattgaccagaaattggttatctgccaagtcaacctctctttcaccttgcagtttgcggagatgattgtaggcagaaattcctaaaatcggtacttttgattcaggaagttccttatcatgcgaccagagattgctagtatcaatcaaatctttatagattaaatcactagaatagataggatagctgtactcctctttgatgaggttaaagtcaaatccatctgctttcaatctgtctttgacagattcctgagaaaactggaactcttgaccacgataaagattgacagatacgtcataaggtgagtatttgttcagctctcggttcatagtcgtataggcactaccactaaaaactagtaagcttagagccagggtcaaggttaaggataagacagccaacgtgaccgaattactatcagcttgttttgaaaattgacgaattttaaaactgtttagtttgtgatagtaggtttgaggcagttttctaagggaaaccaagataaaatggctcaaggtattgtaaaataaaatcacaaaaatcacgaagacagataccagcaagataccccagcttttcaagagtgatagatggtgatagtctgaaaaatagagagcaccaaaaccgataacagctgtcgaaagaataaagagaagtgcttgaagaactgggttgccttttgccaagacagatttcttgactccattttcttgaatgagtgcaatgatattttgctttctaaaggtaagaatgtccatgacaccaacaataaaactggttaccaaataggaaaaaactagtaagataacagacttgctatcaaagaaaagcagactaccaaagtaattggccataaaaaactcagatgcaatcttagctagaatgaccagtaagaacactccaagcaagaaacctagaatcaaggaaaagatattgaccagcatggtttcaaagaacatggtacggataatctgcttcttcttcattcccagcgttgcataaagtcccagctctttcttgcgccgtcccaggacaaagtttgtggaataaacgacaagaaaggcaatcgccgatagaatcagataggaaagcaagcccatgtactgactcatcaccgtcgtcaacatttcctttgctcctgataaactttgcatcactggatggcttggtaaagcattaaaagcgtagagcaagctataaatcaaggtcagactgaaaaaatagatggtataggtctgtaaatttcgaaatacatttcgtaaaatcaattttggatacatactctcatcctcctatctggtacggctgtaaatctcttgcaaatactgttcattagataagctgttacgttccaaatcatccataatctttccatcgctaagtagcaccatccgtgaggaatactttgctgcggcagggtcgtgggtaaccaataaaatggtaataccaaaacttttattgatttcctgcaaaagcgccatcagtttttcagaattggcagagtccaaggctcctgtcggctcatctgcgataatcagtttagaatcatcaatcaaggctctagcagttgccacacgttgtcgctgaccacctgataactgattaggaaacttattttttaagttttggatggccaacttatccaaaatttccaaaatcttatcctgatgttttttgatatttttcccctgaatttgaagaggtagaacaatattttcataaactgtcaaggtttccaccaagttgtaagcttggaaaatataggaaatgtttttagcacgatagtcagctagttcattttccttggcatggatgatgtcaaaatcttcaaatcgaatctcacctgatgttggtttatcaatcgttgaaatacagttgagaagtgttgtttttccactaccactagcccccataattgccaggaattcacctttttcaacggacaagttcacatctaataaagcatgaacgatattatccccttgaccaaatgttttcgttaatcctgtcacaataagctgtttcatcatttcattcctccgtttctttattactctctcattatacggtttctttcaaggttttccatgagtattttgtgcaatatattcaagttataaaaaaccgatgcctttttcaggtatcggtcgatttgattatttgcgatcgtttctttttttcataaagtaaacaatccctatgacaacaactcctaagaccagtacaggtgcatagaattctagtgtcccaataattccttccattttatcctcctgtcaaaaaatagagagttttatccacagcgcatgtttggcgaaaaagaatatgtaaactaccaaccacagcgcccctgtgctgttaatctaacagccgtcccccacccagcagcagattttccatccaattcttggatattaatttccataatccaaagaatcaatctcaaagttatcttgttttatttgtatttctcccgtcaatataacactaaatcaaagtgttgtcaaagttttgtaataaaatactagaattttccttttgttttatctaacaacgaacattatttgtcgtacactcataggaacaggtgaaacacaatccacagcgacctgctagtgtcattttaaaagctgtgtaccaccagctcctgatttcccggaaagttcttggttttcaacctcgaaacttagagaatcaatctctggacgacttgtatttttagctataaggttgcctccttccttcttttagatgatcatctttacagtaactagtataaactctagtattggctaagtaatgagtaaatcgtgcaagtttcttattttcgagaaaaatttttatagtgcccaattaaaaagtagctgaacaatctcttgctcagctactttttaatcttcttatccaactaatgattttcaaaacaccacataaaagtaaggatagattaaataccgcataaaatcctgtaaaactgatcagaccattctgggataaatcttccatataaagggtcggttcagtaaagaacagataaattccatagacctctacgaaaataagaaaactgacaaaaccaataaggaaaagtccactggcaataagaaagagtctccataaaagaatgagaattcctcctactgctaaaaaaattactgggataaggagtaaatcattcatgactttctcctttctagtcaatcaactgacggaaataggtggcaagagagtaatcaaattcctctagcttttgaactaagtccaaatactcctctttctcatgatcatttgtaggaatgaagcaagggtctccaagactttcatcatccatctgataatagacttcagttatttcttttccaacttcgatccccaataaattaccatcaaaagcggattcttccatattcccagaaatgacattctccaaagcttcgcgaacatctggataaaaattagtaacttccgaatttaaaaaatttgatagggaatgaaatttaagatcagcatctgatctgtttgctcatttccaaaagagactatggaatacgttcttttcatcatcaataccttgataaattgcaaaattactgagctatctcagaccagaatgaaatctgcgtcaaatctgttagtgcggtttcctgtgttattgttttaccttttaagaaatctgttaaacttgctgaataataaataatttctgatccaacaattgagaataccggcgaaaccgcagtaggttcacaagcaatatagcgatggccaactatcggaattaaggttggcgcagatttcattttactttttataaaatgatgaacctcatgaatggtatttggacattctccccagttatcattccattcaatatcatctatttcatccgtaatctcccccatcacttcttccatttgtttctttaaacagtcagtgttttctcttgaaaaatctgcccagttataccatccatttgggagttgttcaagatcacgatatactttcttaaattcaagaggcaaaaccaccccataagtttcttcaattttttcaaagacttcatctgtaaattttctaatcatatattaccttattctattaaatgtttgatagtgatcctcaataaaccaaattgaaccatcatcaccaatgactattcgttcagggccccgagatttctctttttgataaggattttgttaccttaaagcagctccatagctacagttcagcttctggaaattgcctcaagaaattttgattagcttcttcttgtgtcacattcggtggccaacagtcattttttaacctaaaatgaatttctgtcagcgttttttccccagactttaataattgaaatagttctaatgggaattcataaactacacgctgaggggcaattcctccctcctcatcaacataataaagagtattaccatctctccatatatgctgaccataacattttatttcctcaaattgaataacatcttcccattcaagttttgttggtttcattttatacctctcttacttaagtggtgatacataatcatctggaagtttaccttcagattcgatccactgtttctcagcaattggaatcaattcttagtttcgttatcaaatcaattaatctattgtccatcaattctctttttttaactctttctctaattgttttaagactactaaaatttcgcttttataatccattgtttcatctacaaatcttcttgctaaactaaaaaaactaatatcgccgagattttctcctcttcctatactcttagttaagttatatatatcctgtataattcccgggtataacttctgacttggatattctaagtcaattaaatcttgtaatttgtctgcatacttcatatatttgttttccataattcaaaacctcaatttggtacagctcgtattccattatccagtcttatggccattgatttgctaataaaacttgatcagcttctctgtaaattttctaattatatgctaccgtattctattaaatggttgatagtgatcttcaataaaccaaattgaaccatcatcaccaattgctattcgttcagggaatagagatttatctttttgataaagattatgttaccttaaagcagctccataaaaatttgtaccatttttaattttccactatgtaaacttgaaaactcttgacctttccgccaacaacatgtttttcaacatcgctttcccaccaaggaagaacatcttcttccaaaatttctaaaaataagtctttagaagataagtcatcttttaagaaactatcataattttcaaagataaagctgtattcttcagcttttatccatgagaggtccgttagccaatccgtaatagacgaccaattattcgcatcgggaagaccgacaattttttcaagaaaatgaaatagctcttctttgttttggatctgcttcccatcaaaaattgctacaaagccactgaaaggcaatcgatcttgtatttcaagtttcgcaatataatgaattctatttttcatgcttgcaaacctctcaccatctctttatagggatggtagtttattattgacatcaaattctttataagtgattggagtgttgtactaatcagtagttggcaaaacattatcagcattcctgaatttttttactgccgcagttccttttgttaaagcttctggaaattgcctaaagaaatttctattagcttcttcttgtgtcacgttcgctggccaacactcattctgaactctccaagatacttcttgtagtattctctctaatagtacaaataattattgtgggagttcatagaccactaaccaagaagccacggtgccttcttctaaaactaaataatatttgtcctcatttttccaaatggattttccatatccttcaatttcctcaaattgggtaatatcttcccattctaggtttgttggcatcattttatactttcattacttaagtagtgatacataatcatctggaagtttgcctctccagtcaatccacatttgctcagcaatcggaattaatttttcaagttcttctttagtaaataaatctctagtttcaggtaaatcaattaaagatgtagggctctcttctatgaatcgtttctcactagctctcttttcttcttccgtcggtggccaacgatcattctgaactttccaggaaacttcttggagagttctctctccactctctagtaaggcaaataactcatttggtaattcataaaccactcgctgagtggcaattcctccctcctcagtaacgtaataaagagtattgccatctctccaaatgtgctgaccataaccttttacttcttcgaactggataacatcttcccattctaggtttgttggtttcattttataccttccttacttaagctgcgattcataatcatctggaagtttgcttctttaatcaatccacatttactcagcaatcgaaattatacgaattattcatgctctctttcgtaccatgaagtatataatggactaatcttttcaaataattccttttcatatctatatctattctcttgtactttctcaaccaattgattaactttcccaaattcattatttttgatcaatttatgaattaaatctacatctttttcatcaatgttatgtgatgaaatatttttaatgattatctttaaaatttgataagttacctcgttatcatctaatttagaaatctcggatgttatttcccctcgttctgtaaagactagattatatcttccatttccatcatctattacagaaattccctccggatagtaggaaggttgttcagaaaaataaattccaaattcatctaattttaaatttccaatttttgcaacttcggattcaattttgttttttaattttattagcattttattattcctatttcaatctaagtaaaaatctacttttttattcatcaatcgagttctaattttaatggctttacataatccattaatatcagcaaaggttaccgttccaataaataattagcaataaccatttttaattcggtaatagtctcattagtctgttttcttaattcaacatcatgattccaatagtaaatatcagaaagtcccccatgtggtggaaaaaggacttgataaattgtcaatttatctcttaaactcatttctctattagtatttacatattctttcaaaatatgtagctcatccacttgtggaccaatatttttaatattatatttgtcaatgatagacaacaaatgatcgatcgcttctaaaaaagtttctctcatactactgttcgtcattagaaaaacctcattaactactactattttttcatacaacagttaagttaaatttctttaaacttacttttccttaaatcctattctacaaaatatggccatgaattcatactaaaacaaaaagagagcagcaaactgagctactctccattttatttatttttcgaccataccacccttgataagactgtctttcgttactgaataactaactgttttgtcatctaggggattaaatcctggtacgatttcttttaatttattaaaatcgatttttgtgtaatcaatggtattgcgaatataaaagattccgtctttgtattctgatgttagttcaaatccatggcccatcagatctttgaatttttcttggctcttggcgacagcttctttcatggtttcaagagggttctcaccaggcacttttgagacgtcgtaatcatcaactttttcttgtaacaacaaggtatctcccttgtaatacaaggtgatagttgacttacctgcttcatcactcgtttcgagaacagttttttgagcacctgctagtgcatcttcttttttgctttcatcagttgatgactcttttgtcttttctttagcggatgatttgcttgttgctttactggtcgctttagtagacgatggactagtagattttgtagtctctttttgtgcgcaaccagctaaaagaagacccgctgtcaagaagacggctaacatttttgtggttttattcatcttgaatacctcattttttgatggttagggaaatgactgacgtctgaaatgagtcatgtagcaagatcaactgtagatatagatgttatcagaaaagcctcaaaatgatgttcacaatcctctccttatcgatcattgtagccgtctgggtggctggaatgccaagcccaggcagtttggatgatggtttcgatattgtcaaattttggttgccagccgaggatggcacgcgccttctcagatgatgcgatcaaggtatctggatcacctggtctgcgatcagccatctcaagtggaatcggatgtcccgtcaccttgcgggctgcttcaacgatttgaagattggagaatccagtcgatgagcccagattaaaggcggtcgattcattcccttttcggagatactccactgctaaaagatgggcatctgccaagtcaaatggatggacatagtcccgaacattggtgccatctggtgtctggtagtcatctccaaaaatagagatcttttcgcgtttgccttgggccacttgtaagacgatcggcaagagatgggtctctggtccatggtcttctccgatagatccatctggcttagcacctgctacattaaagtaacgaagaggcacatacttgatgccgtaggcttgatcggcccagcgcataatggtttccatcatgagcttgctttccccatagggattaatcggtttttgtggagtggtttcaagaatcggaatttcttctggaatgccgtaggtggcagcagttgaagaaaagacgatgtagtgtaccccacattcatgcatgacttccaagagtttgaccatgcctgctgtattgttatcaaaatatttcaatggatcggccatggattcagcgaccagtgagtaggccgcaaagtggatgaccgcatcgatatctgcatgttccttaaacacagtgcgcataaagtcttgatccgccaggtctccttggtaaaagacggcatctggatgcaccgctgcacggtggcctgtgaccaggctatcgaccacgacgactttttcctgtccttcattgaccaaacggtccaccatatgggaaccgatatagccagctcctccgagtacgagtattgccatttgttttcctttcgcttattgtcttctctctaattgtaccaaatttctgccgcttctccacacttaaagtgtcgcaacaaagcgtctaaaggcagcttgtccttctgcggttcgcttgtagactccagcatcttccagcacacgcgcaaagatctggccaaccgattcacggacaagggcttctgcctctgcttcgtctgtgatggctgggtgcgcagctttcaaatcatctgcccaagcctggtggtaggtcgccacagtattctcacgtccaagtagatagtcttggacctgcttgagctcttccttgagtcgaggtggcaaaatcgctaggcccatgacttcgatcaggccgatattctcttttttgatgtgttgcacatccgcatgtgggtgataaatgccatctggatgctctggtgaggtttggttgtcacggagcaccaagtccagttcataatgcccatcacgaatccgtgcaataggggtaatggtatggtggggctgaccgtcggatgccgctaagacttgaacggctggatccgagtagcctcgccaggctgttaggatatggtctgccagggcaatcaattgcgccttgtcgtctgattgcaagcggaggaccgacatgggccagttgacaattcctagtgacacagcctcaaatccctcaacgctaaagctttcctcaacaggagctagctccatagggaaggtgtgtcgtccgccttggtaatggtcatgagtcaggatggatccccctacaatgggcaggtctgcattagaccctgcaaaatagcctgagaaagtctcgacaatggtcaagagtcgctcaaaggtcttgcgactaatggccatgggcacatgctggctatcgaggaaaatacagtgttcattgaagtaggcataaggggaatactggaagccccaatcatgaccgcccatgtcaaagcgaataatccgatgattggcccgagctggatggtctaggcgaccttgatagccttcattttcaaagcacaattggcaggctggataatgactggctttggcaagcttggccgctgcaatgtctttaggatctttttcaggttttgacagattgatggtgatttcaagagaaccgtagggagtttctgcctcaaaggcaatattttgcgcaatcgctttgaccttgatgtaatcattgcccttagagagggcatagaaatccgcaatcgcgtcttccttggactgacggtaggtctcccaaaagcgatggttgacctgactaggactaggggtaatccaatccatcagctccgcacccaaactgtccttagtggccatgctgtcttggatcttgctatttgcaacagcgatctctaccagctgatctttgagtgcgatcaagtcttctttttgagctggggcctctagtccatcttctccaacgcgactcatgatgcgattttttagataaattcgatccatctcttcatagtcacttgcatcaatgacggctgtgacaaatgcatctaataccagttctgtcatcctatctcctttttaatcaagtacccgtgtccccgcagcaacctctgcaatgtagaagcttggcgcatagccaacaacttcttcataacgtttgccgacaacttctttaaatgcttcaaccttatctttgttgacaagggcgatggcgcaaccaccaaagcctgctcccgtcatacgagcaccaagcactccttcttgttcccaggctgtatgcactaaggtatccaattctagaccagtcacttggtagtcatgctccaaggatacgtgggaagcattcatgagacggccaaagccttccaaatcacctgcttcaagcgccttgcgtgcttggagggtccgttggttctcaagtacagcatgacgagcccgtttgatgcgattttcatccttgatcaagtagctgtaagcatcaaaagcccagagatccaattcccctaaggtttggatattcaatttttcttggagttcagagatggctgtttcgcattctgaacgacgttcattgtattttgaatccgctaattcccggcgtttgttggtattcatgatgactacgacattgtctttgaggtccagcggtaccagatcatactctagggtgttggtatcgagataaatagctcgttgatcggcccccataccgatggcaaattggtccatgatgcctgagttgactccgatgaaatgattttcggtttgtttgccgatcttgaccagatctagacggtctaactgaagatcatatagtttctcagcgatgacgccaatcaagagctcaagggaagctgaagaagaaagaccagatccatttggaatattgccgtagacatagacgtccattccgctatcaatgacatgacccgcttcttgcaagaagtggagcacaccttttggatagttggtccagttgtgctctttttcaaaatggaggttttcaagtggaacttcaatgatccccttgtcctcaaagtttcctgagaagaaacgcaagaccttatcctcacgctttcttgcagctccgtaggtaccaagtgtaatggctgctgggaagacatgcccaccattatagtcagtgtgttcaccaatcagattaatccgtcctggtgaaaagaaagtatggtcagccttttccccaaagacagtctggaattttgcttgtaaatcttgagatgtgattgttgtcgtcatgagaaactcctttagttttgtaaacgtttttatacttgtattatatctgattagaagtaaaatttcaactatttttagtaaaattttattaattttttatattggatcaaaaatggcgataatagaggcttttcatccgattataacttttattcctcccttgctatttcgagttatttttagtaatttttaccaaaaaatctcaattaggagatgacccaattgagattcttcattcattagtgtttctttcttggatagacaaaagatccaaggaaggttaagatgctgacacccataagggctaggaggttccctgtttgaccggtcttaggcaataccgatgatgcagggctggctgacacacttgctggagcctgatcagtggcttgtgacacagcgattggagtaacttgtgggcgatcgaggttgctagctttttcttgcttgctaacaagaacctgtgttccagtgtgaccaacctctactggttgtgtctgatgggttggatcttgaactggtgaagttggaacttgggtttctggtgttggcaatggagcaggtgctggatagaagagaccatgaccaatgcggtaggcgtactctgtttccgacatttttccatctacaatttttggaatatccaccggtaaggtacctagatgttccttgccattgaagatgacttccactcctgcaggaatattaggaccaaatgcattgtctggtttgagggattccgttggatccattcccttatttccatagactgccaaaatggctttggctgctggatagttggctacatcataaggtttagagatagaaaggacagctgccttcttatgattggtattggcataattgacgatctctgttgggatcttggtccgccagaaatctttatccagttgcccttcatatccgatctctgaaatcactacgatatgggtggctttctctaggtcttcttttagactatcaagggtggattccttagtgaagttcttggccacaaaggaggtatcttttggaagcactccgtcagcaattaagcgacgcatgcccaaattgagtccagggacttcattttcaaaagctcctaagagcaagacatggtcccctgtttgcaccttaaatggcaaggtattgtcttcattttttacaaccgtcaccgctgccgctgcaatcttacgttccaagtcacggttgaggctagatccgactgcttcttctgctttttcagctgtccgagcacttggatcaaaattcaagaccccacgtttttctttgagggtcagaatccggcgaaccgactcatttaagcgttcttctgagatgtcaccggtttggaccgcatctaccaccgcattgataatggtatcaatcttagtcaaatccgctttgctgcgaagggtcgttggcatcaagaccaaatcaactcctgctttgatggccatcttcacggcttccacctcaccgaagttcttagcgatagcatccattcccatggcatcggagacaatcactcccttatagccgtatttcttccgtaccaagcccgttaatatatcatcagacagtgtcgctggaacatagattttctcacctgtttcttttgacacgacctgatctttttcaatctgcgggtactggatatgagctgtcatcaagaggtcgaccccttcatccatagcttttttgaatggaaggagttccaatttttcaagttcggcaagagatttatccaccaaagggagacccgtatgcgaatcgaccgctgtatctccatgacctgggaaatgcttggctgctacagccacattgtagtcctgaatgcctttcatcatcggaatacccaagtaggcaacccggttcgggtcagatgagaaggaacgaagcccaatcacagggttttgaggattattattggtatctagaactggggcgaagtccacattcaatcctagtgcagaaagttcacgtccgatgatttgaccggcttctttcgctagtttgggatcattggtagccccaatggccatattaccaggaagggctgtacccgtacccaagcggtagacgatccctccttcttggtcgatagctaacaatagcggaatcttcccgttattggctttgttttcaatcgctgccttttgcatatcttgcgtcagagccagagtttgcttggtctctttgacgttttcagcaaaaagaatgacgcctccaaaatcatatttatcaattgcatctgctacttcagcattgaccttggtgagatcctgtggcgattcctgattagcctcctgccacttacggaagtccggcatgatcatttgagtcaccttttgtttgagtggcatgttttcaatcagtttttccacttcaggagaggccgtctctgtcgatgttaccgttggggaggcagcaggaacagctgcacggtctgttgaagtcggcgtttcggccacttctccctgattttctgtggtgctttctggcgttggagaagccaccacctcttctactgttgctgccggttcattggcttgatccgacgcttgagctgtgtctgcttttgctgtttgaacggataatagagcaaaagccgttaatagggccgcagatggataaatgatttttttcataaagcgacctcctttctttcaatagatattgtaccattgttttatagttttgtaaacggttgcaattattcgtcataaaaagacctcttaagtagattttggtcatttaccctgtctacttaagaggcatcctatcaatagctatttgctttttctgattattttacttcttcaaaaacccaaatgtgagagtcaaaatcacaactcagtttctcttgatttaaaggctggccacaggaagcgtctgaaagactaaagcctgctaacatcagttctgcaccactatactgtttcccatccacttcatagagagcgtctgccttcagtccttgtagatacacacgatcatagccacggttcacctcgtttaatagcttatactgagccagaatcactcgggaacgattttgactgacaaccgaccatacgacttgatttgagtcaaaaggagagcgcaaacggtaaaaattcccttgatgaatcagggatcgctcttttttgtaaaagtcaatttgttcttttacgatttccttctcagcctgcgtcagctcagctagatccaactcgtaaccaaagaccccaaaataagcgacatttccccttgtcgtaagcggtgtgatccgattggtttggtggttagggacaatggacacatgtgctcccatcgtcgagagtggataaactagactagttccgtattggatcttaagccgttcaacggcatctgtatcatcactggtccaagtttgaggtgcataataaagcaaacctggatcaaatctaccgcctcctgaagcacaagattcaaagagaatagaagggaatgctgtcgttaaacgatcatataagtggtataatccaagaacataacgatgaaacacttctccttgctgctctggagccaaggatttagaaaagacatccgtaagcggacggttcatatcccacttaatatagtctaattttgtctcttcaatcacccgtgccatttgttcataaatggcatctactacttcttcacgactaaaatctaagacaaattgatttcgtccatgacgtggtgaatgacctgctacttctaggatccagtccggatgtgtacgataaagatcgctatctttgttgaccatttccggttcaaaccaaaggccgaatttcaagcccatatcatgaattttctctgataaagccccgattgtgtctggaaatcgctcgcgattggcaacccaatctccaagacccgttcgatcattggttcgttttccaaaccagccgtcatctaagacaaataattcgacgccaacttctttggcattttgcgcaatcctgagcagtttttcctgatcaaaatcaaagtaagttgcttcccaattattgagtagaatcggccgctccttatctcgccattctcccctagctagacgggtacgataaagacgatggaaagtttgactcatatcgtttaaaccatttctactgtataccagaactgcttctggacttgtaaagctagcaccagggtctaatttccaacaaaattggaagggattgattcccacttgaaggcgggtgacatcgaaggtatccacttctgcttgaagaaggaaatttcctgagtaaatcaggctgagtccaataacctccccctgattctcggtggtttcaggtcgttttagagcaatgaaaggattgtgcagatgactagagattccacgggttgattcaatcgattggattccttgacgtaacaaggtggaatgaatgtgcctttcacgagcccacgctccagaaagctgtatcatctcatagtttcgatcaggtaggtctaaagaaagactggtgactccttcaatagaaaggggccttgagccttgattgttgatcaggtgacttctcgttatcacagggaagtctcggaaaatactatactgaatactcacttccacacccgacaccgaatcgatcagattcacttgcaaggtctggcattcatcctcgttttcaacataagttgctggtaaaccttctaatcttggttttccctttaaaatcacatgatctttatagataaaatctgtcagccgagaaccattttcaaaagacagttccaaggcagggtggcgaaaatctgtcgccccatactctggaaattcttgctgcaagtgttcgagtgcatacagaagatccccttcttgccggtaagtggtcatcggacggtgcttcatttccaccaaatgacgataatccccttctggcaaggtcgggccataataaagatggagcaacttcccatcatgggaaatcataaagatataagaaataaaatcatttcgcagatgaaactgcttgtatgtttcctgatagagaataaggtccctcatatttatcctttcttgtatcagagttcctagtattatacgaggctattaagacagaatgagacagaatttgcgaagatcaaagtagatcttgaatgatcagcccctgacaaggtcaaagttgcaaaaggattacttgccgggtagataggctactagaaaggtctgccaaatcctttgttttaaaaatattggagaaaaactgtctcgccctgacttcaatcgtttttaaaacaccatttcttgaccgttttctgtcacttggtaagtgccctcagcaagatcgattcgggctactgctgtgacagtttggtctttattttggcgcgtgatgacaatggtatgatcatctggtgttaccacctcaatgcttccttctagatcaaaagcttgcgagttgttccggaaactaaagagcttgagaagggattgcacgactggccgctccacttcttgagcaatttcttcattgctgtagtaatgacggttgatattgcggccttctttggtgttttctaagagttccaaatcattcttcccggctaggaatccaacataataaacttgtggaatacctggtgcaaaagcttgaattaaacgagctaggaagtacttacgatcgtcatctccaagcgctgaatagtaggtcgaattgatttggtagatgtccaagttgttgtattctgctgttgaatatttgcgtttaacatttgccccaaccttatagagctcatttgaagcatagtcaatctcttcatctgtcaagatatccttgacatcgaccactccaattccatcatgggtatccagcgtcgtgaactgcttcatgggactcatcttcagccacttggcaaggcgatccacttttgaactatagaggctatagagggtcaccattggaagcgcgaagtcatagacataataatcgtggtcagcaatcttaaactggatggaatagtgctcatgaatctctggaagaagctcagcaccgtagcctgccgccatatcgcgtaccttatccaacaaatcccaaatatctggttccacaaagaaatcattggtgtccaatttcttcaccgcataggcaaaggcgtccaaacgaatgaggtcacagccattgcttgccaggtgttcgatggtcttgcgaataaagtccatggtcacttccttggtcacgtctaggtcaatctgctcttccccgaaagtattccagagatgctcggtcgtcccatccgcaaaagtgatggcttgcttgggagctcggtctttgcgcttataaatcaaatctacatctgcttgagttgggcgattctctggccagaacttgtcccagttgagaaagagatccttataggcactttggtcatgcttttcctggtagtccttgtagtatttagactgacgggaaatgtgattgatcataaagtcaaacataagataatacttgtcacccaagcgtttgacatcttcccaatctccaaaggctggatccacttggtcatagtccacaggcgcaaagccacggtcaccagttgatgggaaaaatggcaagaggtgaaccccacctactgcatctccaaaatgtttctccagattttcatagagatccttaaggttatttcctaagctatctgagtaagtaattaacatggttttgttttgaattggcataatggtttccttttcttttttttgaaagccaagtcttaggagacctggctttcttgagtttttctattttaaaattgcttcctaggatacgatttaaatcagcaagctgaatcgtccctttgtatctggaattgaacacgggactaatttcttaggaaaaaagataaatctccttgtgtgcaagcacactatgtcgatttcctatttttctacagaaattttcagcaagctgaatcgtccctttgtatcttatttcttatttcactgcgccgttgctcattcctgcgatgatatggcgttggaagaagagatagacaatggtgatactgataatgccgacaacgtaggaagcaaagcttggtccgtagtcgttgaaatattggcctgcatagttgtattggaacaaaggcaaggtccacattttggaatcccggttcaagacaaggagtggcaacatgaagtcattccagaaccaaagagcattgataatcatggttgtcgcatgcatgggtttcatcattgggaagatgatacggaaataagttgtaaatttattagccccatcgatctctgctgcttcatccaaactttctggaatagagattttgatataccctacatagagaaagagggtctgtggaatcgcataggtcaagtagagcaagatcaaaccaaaggtgttagctaaaccgagtttactcatcataaccgtaatcggaatcatgatgacttggaaaggtacgaaaatcccaaggatcaagagggtgtacatgatggtaaaggcttttcttttactcatattgcgggcgattgagtaggccgccataggaataaagatcatcacagcaagtaaagacaagacagtgatgacaacagagttccaataatagcctccaatgccatcagctaagagacggctaaagttgtcccatgtgaagttggttggaaatccaaagaaattatctacaatatctttggtgggtttgaaggaactaaagagggtggcaaggagtggcactaaaatcagaaccgatcctagaatcaatagaatatatttgccaatcaaggcttttctttcatcttgtttcatcgtgcttctcctcttaaatttcaaatttcttagatactctcaattggatgatcgaaatcactacaatcaagaagaacaagattacggcaatggcattggcataaccgaattggttgtttttaaaggcgtagttataaaccaagagcccaagggaggttgtggcattgtttggaccaccaccagtcatggcaaagacttggtcaaaggcggtaagcccaccttttagggctaggataaagaccatagagacacttggtagcaagtaaggcaattcaatattccagaagacttgcttgctagtcgctccatcgattcttgctgcttctgtaatttcagttgggatagattgcagaccagctaggaagataatgatgggcatggccacaccttgccaaagaaggacaaagacagccgcaaagatcgctccccacttagtccctaaaagactggtttgaagaaactcaatatgaagggcattcccaatcgctggtagaccgtagttgaagacttgtttgaagatcaacgccactgtcaaaccagacaaaacagctgggaagaagaaccaagcacggaagaaggtttggcctttgattttagagttcaaaacacgcgcaatgaagatcccaagggcaatctcaccaactaccatagcaatcgtgatgatcgcagtaaagccaatagcattcatgaattttggatccataaagaggagcttaaagttgttcaagccaacaaatttgtagttataggtcaaacctgtccagttggtaaaactgtaaaaggctccttgaaacattggcacatagaagaaaattgcttgtaataagaggggaatgaccacaaaagcccatgcccaatatttttgtaatacttttttcatcgtctctctactcctaatccacatccgctttcatcgggttaaagaaggcattcaaatcattgaccattccttgtttatcacctgtcaagacatagttcatcgtcaaggtatggaagtctgcttcactagtccagtattgttgcaaccacaccaagtgacgatccgtaaaggcatatttggtcatcccagcaagcggtgaatccactcctgcttgtttgaccccttcgatcgctgttggagatccgtccacatcatagtacttttgcatgacttctggacgggtcatgtattccacaaaggcattggcttcttttggatgtttggtagtagctgagatagaccatgctaagtctcccgcaccaacggttaagctttgtcctttttctttccctggaatcatgaaggtcccaatcttaaatttcggtttttgttcattgatcgctgtgatggcccaagaaccatttggtgtcatgaggacatctccacgcgcgaaggctccgataacgtctgtataacctgcaccttcccagttcttttgcttagatcctttaatgcgaaggatatccatgaccttgatgtcatccttcataatcggatcagacaatttaatggaatttggctgagaataacgaaggtattggttggcttcttttccgccacctgctgctgtcgcaaaggccaattgattgtacccattgagggtccaagcttctgcacctgcaatcccaaatggagtttgtcctttggcaacaatgtcttttactaactgttcgaactcgtcccaagtttcaggaaccttcaagcccaattcttcgaatttatctttgttgtagtaaattccataagcgttggctgtaaagggaacgttgtagacttttccatttacagcatatttttcagcgtagccatttttcacacgtttgagataatctttattggacaaatcttcgaagacgcctgcttttgcccattcttgtagttcgatggactgtgggtaaatattgaccacatctggcacatctcctgcgaggacacgtgttttcaatacttcaccagcgttcggtacattgacgactttgaccttgacctttgggttttccttttcaaaatcacgcgcgatttcttctagggttttggtcatttcttttttctggttgaaatactcgatagtcactgtgccatccgcagatttaccatcgttggagcaagcaccgagcccaaacaaggctaggcctgtagtcgcaagaagtccgatttttttataccatttcatttggctgtctccttttattttttgacaaaaacatattgtttagtgaggaaatctccctgaggaagaacgacggttaagccggcgtacatgagctcagctcctgaatagacttggtccgtcccttttaagctatagagcgcaccttcttccaatcctttgagtttcagggtcggctcgatctcctcaaccgttgataagacccgtacataagtcacaaccgtgcgatcttgataagtgaactggacggctgcttgattgctaccttggcttggattgatcaagcggtagtgttttccgaattgaacaagtggtcgaatcgttttgtaatgtgtgacttgagctgcgatccgatccaactcttcttgtggaagactggttagatccaattcatagcccagatttcccatcatggctacatggccacgcgtttcaagcggtgtcatccttcccatctggtgatttggaaccgctgatacgtgagcccccatagaaatgataggatagaggtagctagaaccatactggatcggaagtctggcaatggcatccgtattgtcacttgcccagacctgagggaagtaccgcatcataccaaggtcgttgcggccaccacctccggagcaggactcaaagaggatgttctcgtacttctctgtcaagtaagaaaccacttcatagagacctaaaatatacgcatgggattgcatcttggtttcaaggtaggttttcccatttccaagtttagtgatattgcggttcatatcccatttgatatagtcgatctcatggtttccaagtaagtcatccaagacctgcttgatataagccactacttctttattggagaaatcgagcaccagttgattccgtgaataggtgtgttcatagcctgggacttgaatagcccagtccggatgagcccgatagaggtcgctatcaacagaaatcatttctggctccacccaaaggccaaattgaagtcccttgtcatgaatgccttggatcagttctgctaggcttcctcctaatttttcttcattgacagtccagtcaccgagggcccgattatcatcatagcgattgccaaaccagccatcatccagaacaaagagttcgatccctactttttgagcctcatccgctaactccaataatttgtctttcttaaagtcaaagtaggtcgcttcccagttgttgatcagaattggacgttctttatgggcaaactggctagaaataatatggttttggacaaatgcttgactctcttgactgagtccggtcaatcccttatgtgagtagctgatcatggctaccggcgtatcaaagctctgatttggcgctaattcccaggagaagttttctggattgattcccaatccaacccgcacttcattgagttgatttttttgaacaaatccttcaaaattcccactgtagagcagttggaaggcaagggcagagccggcatcttcggtcacttcatgctcagcaagaatcagggctggggtctgcgcgtgtccagaagcaccacggttggagcagatggagaagattccttgctctacttgctggcggcggacggttttttctctcgcataggccccttgaagggtgatgacatcatagtcacctgctgggacatctgccaacacactgagcgccttgtggatcacgacgctttcatcactgcagttttcaatctttgaaaaactagtgatggttgcccgatcctcgtaagccgtgtaatagagggtcaaacgaagggccgcttgatcatcttcaaagatcagggctaaggtttcagcctgatctaccgagtgaggattcggaagaccagttgcctcgacactgccagagtagatattggctccgacatagaggaaatccgtcacctctgtggcgccgtgctggatttgaatagacggctttcggaaatctccaagcccgtgctgtcctaagatctgacgctgggtatccaagctgaaggttcgattgtcaggtgttggatttccagagaaagcatgatccttctcatgcaccgtattggaaaaatgataagacaggatcggacgtcccaaatgcttgagcattaggtagccatctcgattttcaaggatcaggctcagtcccttactttctacatagaacaaattttgttcgatacgaattgccatatcttcctccattggatcctataaaatatcactatgtatttttaaattcagttccaataattttcttttttaacatgtctttatcttacattatgtaaacgtttactaaaatagaattttgttggacatatatggtaaaatgttaggtaggaggtttacctatgttagtcttttctgaataccaaactgataccattgacctagcccttgatttttatggctacgaagattgtcctaaaaactatgaatttggccccagcgttcgggacaattttgttctgcattttattaccaagggaaagggagtcttccacttcaataaaaaagaaatccacctagaggccggggatctcttccttctcccccaaaataaggtgacctactacaaggcagaggaagaagaaccttggtcctactactggattggcatcagtggcaccaaggtgagtgatttcatgcgtttttcaaccttgcatgaaaaaggctttttaaagaaaacagaggtggaaacagaaaagatcggccagtttatggaacaactcgtccacaaggcagaggcttcaaaaatgacttctcactaccaactccaccttctctcacagatctatgaactgctttatctcattggggaagtagcacccaacatacaaaagagctatctctctccaacctatcaactctacctgacctgtaagcatgtgattgagacgcattacggtaaagaacacttgagtattcaagagatcgccgatgacctcaatgtccatcgctcctatctgacaactatctttaaggagtttcaccagatctctcccaaggaattcttgtactcggtccgcatgcagcgtgcccaacagttactgaccaatacggacgaaagcattaagattgtagcttactcggttggcttttcagaccccctttatttttcaaaggcctttaaggcctatagccaactgactcctagccaatatcgtagcaaacataaaatttagtaaaattttatttctttttactagtttttagagtatactggaagtagaaatcaataaaggatgaactatggcaacgattaaagacattgcggaaaaagcaggcgtttctcaagcaacggtctctcgcgtcctcaaccaggatgtgaccttatcggttagtgaagacacgcgcagtcggattcttcgcatcgccgaggacctgcattaccaaaagaaaagccgcaaaacaacgcctcaaccagttgaggattttcataaaatcgtcatttttgaatggtacacgcgcgaagaagaattagatgacctctactactatgccattcggatggggttagaaaaacaagcccaggaattaggatatgagatctttcgtatctttaataatgacgattggtccttgattcaagaggcagacggcatcatcgctcttgggaaattcagtcccaagaccattcgagatctggaaagctacggcaaaccccttatttttgtcgatagcaataccctctatttagggcattcctgtgtgacgaccgatctagaagattctgtcatcacggctctcgagtatttccttgatcatggccacaaggagatcgggctcttggttggtcaggaagaaaccgcagatgcgacaccgcttcaaatggatccccgtcaacggacctttcaacagtttctcacggaaaaaggactttatgaggagcgctttgtctctgttggtcaattctcaactgagtcaggttatcagatgatggagcagctgattcaagacttgggcgacgacttaccaactgcctttttcatggccagtgatgccttggctgtcggagcccttcgctctcttcaggagcaccaaatcgcaattcctgatcgtgtcagtatcatttccttcaatgatacatcgattgctaagtatgtctttcctgccctctctacagtgaccgtctacacggaagaaatgggcaagcaagccattcagatgttgcgacagacctttcaagggagtcaaccaagtgttccctatatggtcaaattagccaccaaactgacgattcgtgacagcagtcgctaggaggtcctatgaaaacacatgaaatcctctttcaaaccctttctcaggcagatgattatgtcaacggggagcagctggcgcaagaactaggtgtttcccgcacctctatctggaaggccatccaacgtctagaaaaagatggggtcgtcatcgaatccctcaaaaagaagggctacaaattggtctcaggagatattctgcttcctgaagtgatcgcaaaaaatacccagttgaccgtttccttaaacgaacaatgtagctccacccaattggatgctaaattaggcatagaagcccatcaagaaggcaaggcgctctacctagccaattcgcaatccgctggaaagggccgctttggtcgtgactactattgccccgatcaagggggcatctacatgtcccttcatcttaagcctcaactgccacctgcagagctccctccttacaccctcatggtcgctggagccatctacaaggctattaaaaatctgaccctgatcgatatcgatatcaaatgggtcaacgatatttactaccgccataaaaaaattgggggaatcttaaccgaagcaatcacgtctatcgagactggtctcgtcacggatgtcattatcggagtcggcttcaatttggctatccctactttcccagaagagctagaaagcaaggctggttccttatttgaaggaccttgtcctatcacccgtaatgacctcatcagcgaaatctggaaggaattcttccaaacggatatcgatgaactggtctacctctataaagagcgctcgctggtcctaggacgaactgtcacttttgagcagaatcagcagacctatcaaggcctcgccaaagatatctctgataccggccaactcttggtccaattagacaaccatggagaaatctggctcaatagcggagaaatctctttgacggaatggtgagggaagtaaaaaatagattaaatgcgatgaagccccctattctgtttgaagggttgatctgcaaagtttcaaggtctgtaagtaagaaacgacaaaaaagcatctccgcagaaggatgagtggagaaagaagagagaaatgaatggaaaaactagttagtattatcgtgccgatttataacgtggaaaaatacttaagacaatgtttggatagtattttaagacagacttttcgcccgttagagattattcttgtgaatgatggttcgacggatggttcggataccatttgccaagaatatgcaaaaattgatgagcgaattgtttatctaaaaaaagaaaacggcggtgtttcagatgcgcgtaatgttggattagatgctgtcacttctgattatgttctctttatagactctgatgattggattgaaccgacttatgttgaagtcttatatgaaaaaattgaagaatatcaagcagacattgtttttcaaaattataccagtttcaatgatgaggattccaatttttacttccatatgtcaaatgactattatgaagaaatttatgacaattattccgtgatgaacttattaaacgattctagtgagtcgaaaaattcagctttaattgttccttgggcaaaaatttatcgaaaagaaattcttaataatcttcactttccattgggaaggatgggggaagatgccgtatttaatttgaaagttttcctaaaagcagaaaaaatagtctacatccacaaaggatcttatatttatcgacatcggggagaaagtttatcacgaaattggacgcttgactggtttaatgagagtcttttaattcaagaggaacgattatcaatgttggcgactctaggatatccactaaaagcctataaaaaaggatatcgggattccttaaatttctttatttcagaaattgaaaatcgaggattaccaaaatctcctattttttatcaaatgaaggaaaaaagagagttactaaacaatttttcccacattcatcaagaagagaaaaaagcaatcattttagcctgtagctttgatgatgtgaacaacattcatacggtcataaaatcgatttgttttcataaccgctccattcgtttttatctcattcatcatgatttcccgtatgaatggtttcaacaaatgaaaagacgattagaggagtttgattcagatattatcgattgtcgtctatctgaaaatacccctttaacatttgatgattttgatcgttttcattctttaatcgttgattttgtggaggaaaagaaagccctgtacctcgaccaaaatatccttattacaaaaaatttggaggacttgtttagcatcgatttaaaaggctatccaatcgccaccgtaaaaattccttatgcttcatggaaacatgaaaccgttactccgcaggttttctttataaattttcctgcttgtcagaaggaaaatacctctcagacgatgatggggatactaggtgacaggtcattgaaattggaaggggacggtcaaaacgatttcaattgtctatctaaatcgaattggttggagctagatgttgactacaacgaccttgatcatcctacatgcgaggcagatcatcccttacctacaggccaagattttccaggaatgatttcctatttacctcatgaagaaccatggagagttcaaaatgatcaagaatatcgcaaggtttggtggttttatcataaccttgaatggacggaattaggtggaaattaccacttacatgctttgcaaaagtatcttttagattctttccgatggtaagtgaaaaatttgatagaccgagtttctttcttcattttataagtaagatgatacttaccgaatctttcaccaataaagatgtgagacgattgaaaagctttgtgaacttattcaaaaacaaaggagcgaaatagccccaaaatacgggctatttcgctccttttcgagagtgggacagaaatcggtaattcgttagaattcgatttcgtcgtcccacctccgcacagttgagtagggctgtaaaagctgatgaaatcagcgtagtagagcctactcaaccactgcgtcttgctcgacaatccaaaaataattgagaggctaggacttttgtcccagcctcttcttttctgttagaaaaaggcttggtttcacttttgggttattcttgaggctctttgggcagttccatacggaagcgtaagcccatagctgttttatcaaattggtaggccagttcttcatggtctagcaagtgttggactacgaagagtcccaagccgccttctttcttctggctactagcggtcattggcatctcagcggtctctaccatttcctggctggtgttttcaaccgccaagtgcgtcccttcttcgagacggagctggatctctccaccggcatctgaatgcttgacggcattactgatgacgtttgagaggaccaattttagaatcgctgggtccatatagattggtttagctgggatctgattgtcaattgtgagcgcgcgggattgagccaagaccttgtactggtcgaggatctgctctacgacctggtctagttggatccactccttttctccggccaattcttggacagaggacagggacaggatttctaggacgatctggttcatctcatcgacgatatcgagggagaccgacagatagcggtcccggtccttgtagcggccgatcttatcccgcatattttctagaataatctttaagctggccagaggcgtcttgagctcatgcgaggctccccgtaggaattccaccttcatctgctccaacttcagattttcctgtttctgctgctctagattgtcaattacttctaggagatggtgatagaggtcgttgatctgttgcttgagaacgccgatctcatcctgcgaatgaatgggaagattggctgtccgatccaagcgcttcatccgcttggtcatctgcttgatctccaggatcggagcagaaatcagtcgggcatagagataggaggcaagcagtgacaggacaaaggaagcaaggagactatagggaaggaagcccagactgatgtcccgcgcttccttttgggaatcgacggttgctaagaattgcaaggtcaagtcctttccttctttggtctcaatttttcgctcttcaataaccagggaattgttctggctgtcagggttcaggagtaagtcatccttgacctctagggcattctgtttttccttgcccttgatcgagaccttgatatcattggtcttggaataaaggtcgatgacggactcaatggttccttcttcctggccttggaaactcttggccagagcctgtgatttcttcaaaatcgtctggcgctgagactcgatataggtcgaggggaaaataaagtaaaccgaagcatgtagaaggatgactaagccactaaaaagggcaaaggtgatcagaaagatctttgcaaagatacttcgtttggtcatggtctctccaatttatagccgacattgcgtaccgtaacgatacagtccagctctagtttttttcgtagttccttgatatagacatcgatcacccggtcaaaaggaatctcctccatctccttccagacggcatcaagaatctgagagcgggtccgggccttgccctcatgctggagcaagtattccaatatttccaactccttggcgttcatggagatggcttgccctgctaggctggctgtgtagctctcaaaatccacccgtgcctctccataggtgaagacccgggaaggctggagctttttaaaaattgcttcgatacggaccttcaagagggacaaggagaagggtttttccaggtagccatccgccaactctccaaaggccgttaacttatagtcctcgtcatggaaggccgtcagcatgaggacagggactgagctggtcttccggatggtcttgagcacttccaagccattgaggatagggagctggatatccagcaagaccagatccggcgcttctttgtgaaagaggtccagggcctcctgcccatcacctgcttcaaagacctcatagccacattccatgagatagtcgctcatcccttcgcgaatcaggacttcatcttctacgattagtatcttcatacactttcctttatctaagaaacttcttctacctcctattataccctatttctattttaggaaacaatctcttattcgacatccaccaagagttcctttggtttcttatgcaagagccattgagaagaaaggatggatacgaaaatcaagagaagcccaccgaccaaaacaatcaccagcaattggctcggttggatgtccatatggagttccgtcagggtcttactgaagctttctgcctcagctcctccaccaaggttggctgcagaggattcttgagccatttgtttggcaatgccactggttacgttcttaagcaccgtatctccgactgctttggcaagaagtcctgcaactccataggagaggaggaaggctgggatggaaatcatgactaattctgccacgaattgccccgcaatctgtaccttagaaagtcctaaagccagtaagattcccacttctctgcgacgggcattgagccacaagacgaggagaagggtgagaagcaagctagcaaatacgaggctaccgataaacaagtagtccgccacttggaacatgctgctgatggatttttgtaaggctgggtagttggaagagctcttaaccaagtcaaagtaattccatgggatatccaaggctttgattttttcgatcaatttatccaggtcctgatcccccttggcaaagaaggtcgcatcctcataggtagctgtttgaacagtattgccgtagagtttggcagctgtatctaggtcagaaatgagggtatcttcatacaattcttgggcgtaagttagaggagcttggttcttccctgagaacagacccttaatggtcacttcgacagtttcattagcccctttttcattgtcagcatcgtagagattagacttgagacgcaccttatcacctaccttgaggccattctttttcgccaaatcttcgtgcatgaggatttgttttttgtccttatcggtcaggtgctccccttggaccagtttgtaggccccagagacaaatttatcttcttttgaagagtcgttgacccccgtcaccatcaaggtattcttaaagtatttagcccgctctgaagattgattttgcagggtttcttcagtctcaatgatctcgtgatctaagatatccgcaatagcattgatccgcctgatggaggaggtgatcccctctacctggctgattttttcgatatcttcgcctctgagattcccagctccccgaggggttcccggattggtcctgcggttaatctgcatggagaagctattggtgatggatcccagactttccgatgaagctttttgggtcgctcccttcatggagagtccgatcaagctcaaggtccccatgaggagaataatggcaaagagcaagagagacttgggccatttacgtgtgatataagcaaaagcattgcgcaacatagcattccctccttacttgctcttctcaacgaggctacggcggctcaattccaagaccacatcggaggcctctgctacttccttactgtgggtgacgacgatgacacatttttgacgttccttggccagtttctttaaaatggcaatgatgtcaccggctgtctgttcgtctaagtttcctgtcggctcatccgccaagatgataggtgcttctgaaacgagcgcacgcgcaatggccaccctttgttgctgccctccggacagttgcaaaacattgcgtttgatttgcgtttcgtccagccccaattccaagagaatctcttttccagcttgcttgttgaccaggcggacattttcaagtggcgtcaaataatcaatcagattgtaattctgaaagaccagtgagacatggtgcttgcggtggtagctagaccctttggtctggatgtcctccccatcaaagaaaacctgccccttcttgggattgtccagaccagccaagagagagaggagggtcgatttccctgccccagactgaccgataatgctgtaaaatgtcccatttttgaactgatagttcacgtctgagaagatctcttcttggtagctttggtaactataggatacttgtttgagttctaacataggtgtcatttctccttaactcatttttgttaatatttcttttggggtcttgcgccagatcatgctggtagttataccgagcgacagaagaatcaagcacaagagactagcataggcgattcctaaggaaaggccttgagggatttggttgagcaagtctagggtctgctgttgacccgtctgtccgacaaactgctctaagaaacgatggctgaccagccgcccgatgagaaaggctgggatcactgctagtaaggataccagcaccacctccaagaggaactgtctaaagatccggcccttgctcttcccaatcgataagaggactccgatttcgtggatccgctcccgtgtccagagactgagtaagagcgatagggcaccggctcccgtcaccaggaggacgatcatcatgattcgtaccaggccttctaaggtcttagaggattccttcatctggtcaaaggccttgcgatcttcgaccacgcgtagcgattgccaatccagatccaagcttttaacttgcttcaagagggcatcgattttctcaggatctttgacgccaaaggtggcctgggtcacttcctgctgactgagacctaggagcttggtcgcatcttcataaggaaggtagacttggttttcactcaaatcagaggtcattcctgtgaatttttcctgtttcttacccgaaaagatcccaacgattttaaaggtttgctctttggcaggagtctctcccatctgaaagctggataaggtcaaggaatctccgacctttagcttattcttcttagccaactcttggtggatcaagatctgcccgcgagccttgtcggataagtgcttgccttgcaccagttggaaactgccactgcggaaatccaggtgctggtctgtcttctgggtaaagacagcacctagcgcttgcttagcttcctgacccaaatcgtctcgctccaccgactgctgtcccgtcatcgcttcttttccaagaatgcgaacgggactttcatattggggaaccatggctcccaccccagaaagctctttcaccttttcagcctccttcagagcaaagggagtagccccctgcttactggtcaaggcaaaactggtcccagtcgactgtttgatatgttcctccagccttcctcccacttgcatcagtgaaaaacagaaatacaagcaagagaggattaagagcagaatcagaaagaggaccagattcctcgttctttttcgagaaatataggcgattgcctgttgtaagagcatgatctcaccctccatttcaaggtccacagcgatacaatgtggacgctttcatcatttgttatagtaattatataaaagaaatgtgaaatgtttatgaaatagaaagagagtgggacagaaatcggtcattcgttagaattcgatttcgtcgtcccacctccgcacagttgagtagggctgtaaaagctgatgaaatcagcatagtagagcccactcaaccactgcgtcttgctcgacaatccaaaaacaattgagaggctaggacttttgtcccagcctctatttgatttaaataatattcagtaaaacatacgtcccacttgcttgacttcatttttcaaagatttatccttcttggatccttgaaaagatctgatcggtcagtcgaacattcaagaagctccaaagagcaaaacctccaaaggtaaagagataaatagctgtcagtaaccgttcaggactactgagactgatataaatcactgccagattgaagaagataagaaagatggtttgaataggatttaagagagcaatgaggaaactattcaaacagacctttcttgtagggtcttcaaagaggccgatataagggaagatcaaggtcatccctccacatagaaggacgataaagggaagcaagatccaaatcccatactcactcaagaaggccgtatttgaaaaaagacaataatccagataaagaagggctgataagcctagacaagtcagccaaatcaccgtcgcttgcttgaaattagcgcgaaagagacggaaaaaatgaaagacgagatccgtatcttcccctttcaacaagcggtgccacatggttgctaaagccgtaagcgatgcaccgatagtgagaaccggaaggcagcaaacgataaacaaggtgttcaagataatgatgtctgtcaaccgggtcaaggtcttgaccaagcgtccatccaatgaaaataatttttgcatcttcttctccttgttcttcatctcaatttctgctacttcctctaaggaagcactcaggggctcaaagcccctgagatacttacttgaatccatttagccccctgttacttcacttctttttggtaacgatcataggcatcctgttgaatcttcataaagtcatcaatgcccatcttcttcaaggttgctttgtaatcgtcccaatccttttcgacgcccccttcgactacccatttagaagcttgttgggtaacataggagttgatatctacataaatagaggacaatttgttcaattcttcttgagagtagatgacatttggatatgctggcaaagcatattgtttcaattctttgtccatcttcaatttgagaccatcaccttgtgtttggtcgatgtcgacatgactattgatatcatctgacacatattttggtccaaagtcacgaagggaattgatccaagcccattcatcggctgatttaccatcttttggagccaaaaccttgtacttgtcgccatctttttcagtcgcaatgccaaaggatccatagaagttttggatgctggcatcatcggtgtagaatttatccaaccatttgagtaattttgctggatccttgcacttattcgtgatcaagatttcattgcgtccatagttcaaatgatctgggtcagaaatgacatattgtttgccatcagggcctttcaatgctgggagaggagcatattcgctagcatgttgaccaaaggttgcgtctgctgtccaaccacttgacacaccgacacgcgccactcccttgtccatccgtttggcaacagacatagaggtatcttctgtaaagagttcagggtcgatcaagcctttcttgtaggcttcatgcatcgccgctatcccttgtttataactttcttccgtccggaggtagaccggttttccatctttgacggacatttcataggtattatctccacccagacggttgttgaatggcaagatataagagaaggtcggatcaaagttaccagagccaaatggaatttcatcattgacatccccattgccattggcatccttatccttgaaggcttgtaaaacagtcaccaattcatcataggtttctggcatcttcaagccaaggttatccaaccatttcttattaataaagagctggttgccgacgattgaccgcatcggcaatttcttaggcaggctgtaaatatgaccatctgggttggtcaccatagcttttaatttcggttctttttcaaaggccttgttcaagtttggcatattatccttgatcaagtcttccaatggaatgaacatgttttggttctgagcaatttcagaatccgtgaaggcattggatcccaaaaaagcgtctggtaaatctccactggcaacaaggacagatttcttatcagaccagtctgcagccaccatggtatcccatttgatcttgatacctgattccttggctgaatcatctagaaaacctttgtgatagtcttccccccaatccgaccaacgaacggtcgtgatcttgaaggtatttccatcattcttgtcagtgcttgatttatttgtggaagctccacaagccgtcaagccagctaaagcagctgctccaaggagcagataggcaaatttcctgtttttcatgatcttctcctattctttcaaggcccctatcatgacaccttgattaaagtatttttggacgaatggatacagcatcataatcggtgctgttgagataacgatggctgcatatttcatcatatcagccttaatgcggaggtcagaagctacctcccctgttgcttgcgactgcaacatttgattactaattaagagacggcgcaggatcaattgcaggggttgaagattttcattggtcaaataaatcaaggcattgaaccaagaattccagatccctactgctgtccaaagtccaataacggcaataatagccttggacaaggggagcacgatctttctgaagtaatgaatggtgccgcaaccatcgatctgggcggcttcccacatcccttctggaatactattgttaaagaaagttcgagctacaacgatattgtaaggagatactgcaaacggtacgaccatcacccagaaggtgtcgaccaatcccaattgtttaactgtcaaataaatgggaatcaagcccccagagacaaacatgggaacgataaagaagacactgacccatttcttagcaaagaggtcctttcgcgacaaggcgtaaccagccgggatattaatgaccagggcaacgatggttcctacaactgtgtagaggatggtgttgagatagctctttagaaacaaaggctgttcaatcaagcgttgatagccatctagtcgccattccctcgggataaaccaaactttaccagttgccacatcagacggattactgaaggaggcaatgataacaaaccacaaagggtagacaatcaacagaatcaagcaaatcgctagaccatagataaaaatatcaaagaggatttctgacttggtctttctcgcatgttgaaacaatttcacaatttctcctccttcctagaacaatcctgtcttggtatagcgtttcgcaaaccagttgaccgacagtaagatgatcaagttaaccaaggtattaaagagaccgatcgctgtcgagtaactatattggaaattaatcatccccactttgtagacataggtcgaaatgatttcacttcctgctagattgagcggattttgcaagagcaagaccttttcaaaaccaacactgagtagacttcctgctctgagaatcaggagaatcatcgccgttggtaacagtaagggtaagtcaatatgacggatcttttgcaatcgactcgctccgtccatagtcgctgcttcataaaaagtcggatcaatggctgataaagcggctagatagatgatactatcccaaccgatatgttgccagacatcactccagacatagacacccgcaaagctacctggtttagataagagggcaggcatctttaagccgactaatttgaggacattggctaacagtccactacttggagagagaaagagaataatcatcccacacatgaccatggtcgagataaaatgaggcaaataagtcgtaacttgaaagatttttttgaacttgcccacacgaatctggttgcaaatgatggctagaacaatcggcaagggaaaaccaaccagaatactgtaaatagaaattttcaaggtattcttcatggttgtcgcaaattggaaggatgagaaaaactggttaaaatacttgagaccagcccaaggacttccaaatatcccagtagcgggagagtaatctttaaaagcgatgactagacccgccatagggatataggcaaataaaatcaataaaataatcgatggcaggagcagcacatataaaggaatatttttcttaaatttgctctgcttcgcattcacttcacttttcataaggccctccttttctttctcctctattttataggaatcctttccatctttatagaactttttcgtgcttcttcatccacttttccgttttctccacacaaaaacatgcactttcccgattttttttactttactatcggtttcgttcatgaatccgttttcaaatagtgctataatatatgtgaggtgctcattatgaaagctattcacagaagtacacgagatcactcgattcaatttttttcgcgcctactctttctcctcttagtcgtcaataccttgatcaaccttttgattggtgggattagccgaaattttattaaacaccaaaatatgctccatttagaggactcgattcatatctatgcggattccttaaatacagagcttcactccgttgagcgttttatgtacagtaccattagccacaatgactatttgacagaactcaataccccgcttgatttcacggattttcatgaaaatctaaaaaaattgcggatcgattttacggagttccagtaccagatggatagccccattacctttttcatagagacaagagatatccctcattttatcaatgcctccagtcttcaactgccttacctggattatgtacaattgaaagatcatcttaaaacctatgacaaagaaacagacaagactagtcaaaaatggcaacgaatcagcctgaaccagcatgattacctcttgaaatccctccattacaagggcaaggctatctatgccatcatttctacccaggatattttaaaacccttgcaaaagctcaatatcgggaaaaaaggacgcttatccatcgatcgtcccaaccagatccatgctacagattccgtcattcaagccggtagcaatcaaacccatctgccttttgatctttatgtaacggtcgattacggggatgttttccgtacaaatatcgtacttgaaactctcctctccttggttcctttgatcatcgctgttctctccaccattctgatcctttatattcgtcaacggatgatccaaccgatgaaacgactcacccagcgtctttctcagctagatgccgcttctaccaagctagatgtgatcgaagaccaagggatcttagagatcgatcaggccaatcacaagctcaatcaggtcctgatccacatgaaggacctccaaattcgagcctaccacgcgcaactcaatctcaaaaaagtcgaactcaattacctcaaaaatcaagtccgaccccatttttacctcaacatgctttccatgattcacagcatgctccagaccaaggactataaggaaatcgaggaattgaccaaggtgacttccaactacttgcgccacctctttcaagccaatcaagatttcaatcgcttagcagatgaaatccaacatatccgaaattacctagaaatccagaaaatccgctatggggacagcatccactttaacctggactgggatcctggtctgaaagatgcggccattccacccctgcttttacaaacctttgtggaaaatgccatcaaacacggcttttctttccaagatttcttccacatccagctttccattcatgaagaagcaaaccaacagcttgccatttcccttcaggataacggtcctggttttagctccgctatcttacaagatctagcagagaaaaaatccttagtcacagaagatggccaccacattggtttgaccaatgcacgagagcgactagatctcctctatccagatcactacacgcttcaattttcaaatggatcccaaggaggtgcccacatccaactgagccttccttatgaaccctacaaaggagacacacatgaatatcctactcgttgacgatgatcgttttatcattaaagccctacaggaaaccatccattgggaagccttgggcattgagcaggtatataccgcctccagtctgagccaagcccaagccatcattcaaagtcacccaatcgccctcatgatcagtgatatcgagatgccacaaggcagtggactagatctcctagcctgggtccggtcagaaaaatatgacattcaaacgatcttcctcaccaattatgctgatttcaattatgcccaaaaagccattgaactccaaagttttgaatactacctcaaaccgattgaccccgaccgtttagagtttatcattcaaaaagccctcaataagatcaagcgccacaagagtgtggcccaattagctcagcaagggcaaaaagaagctgaattttggtatgactacttgcgaaaaccgcgtccatctcaagcagaacagctccttcaagaagtgacaaaacggggttatagccccaaaccacatgaagactacctcttagtcctcatcactctccacttagttgaagaagactttcaccccagcgtcccttcttggcgcttgcagctccgccattgtatcaaggatctctccctagatttccctgtccactactgcgccctcagtaaaatcgaaagccagaccgatcgctacctctgcctcttcaaaaagaatcagactacagagtgtgcagacttcctaaaggctatccagcagaagatccagcaagacttagaccgatcctccatccttctctattcagatgccatttcccttgagacgctcttgatgaaggctctgcaactctgccaatacagtgaagaacaagtcttccattggaacaatatccactcctatgcttctttggctccactacctcaaaaacctgctcatcggacatcgctcacttttacaaatcaactagagacagaacagctcctccaaatcatccatagcttagagactcaagatcgcatcccgctctcagctctgagtgaactccagctagactggacccagcaaattgggatttatctggacaagaacggcattctcgcccacaagttatttcaaaacaaacaccatcaatttctcttcgaacggcgttttcatgccatcgaagcttttgaagcctatattggggattactggagctctgctcgccattatgtgatcgatctagaacaccaatccaatctcatccagcggatcactgactacatcgatcaccattacaaagaggatatcagtcgcactaagttggccgaaatggtatttcttagtccagatcatctagcacggatgtttaagcgcgataccggcgaaaccctgatgaaatacatcaccgataaacgaatggccgccgcaaaagagatgctatcgcaaagcaatacccccatttaccaagtcgccctccaggtgggctacgacaactactcttactttacaaaggcttttaaacagaaggtcggcctctccccaggagattaccgcaagcaatcccaagaagccttttaaaacaagaaaaaaacctttgaaaaaggatttcttttcaaaggttttattttcttttcttcttaatttctttttcaatggcactggcaatcttctccaccatataggccatctggagattgcgcaagatcaagagggcccaaaaacatgcaaagagcatttgacccgccatggtcgcttcattgaaaaagtatgtctccatagcagtaaagactgctatcactacaaattgttttctattcataaaattattttaccatgattcagtaaaaaattcatgtattaatcgtcttgcagggtgattttatcggataaaaagtgaaattcctcagggatgacactttcctcttcttctaccacttcagctttttgcccacgcgccttagccgaaaactctgcccgaatttgggtccattcttccatcgaaacagctaaaatttctggcgagaagcccgcagcattgctgaggatatttccaaacatggtattgaggttgtcccgcttcatggtctgttcagcattaaaggcagactcaaaggctaaaatagcgtgattttcattggcagcgaccggctgggatccgattaagagggccttatccgcacctgccaagctctcgatgatttccccccaagcgttctgaagacggatcaagttggtccgtgccaactctggattttcgaccgcctcttgtaaaatggcgttgaccttatttcgatctgcacggtagcccttgctcgacttggttggacgagttactgctggttttgaagcaggaagactgctacctgattgcgctaactgttgcttgagctgagcgacttccttcttcaagtcttccaactgagctagcacattggaaggaacctccacagcagctgagttagaaacttggcccgtactttcagccaatttaatggtcatcatttcagtgtagatgcgcggttgtagactatttttgatatcggctagactggtcgtcgcctggtcaatcagggcaaaaagacgggcttgatcagcttcaagattcgccgcaaacaagtcactagcgtgagtattttctccgcctgtctggacaatcaagagatctctcaggtattgaagtaagtccgtgacgaaacgggccatattcttcccattatcaaagataatcgccagctgatccagcgccgctgtcgcatcatgagccaggatggcagccacgtactgatcgagcgcagctagactgatggaaccggtgatctcttcggcgattgctgtcgtcaactcactacccgcagtcagactcagcgcttggtccaaaatggacaaggcatcccgcatcccaccttcagcgcgccgagcaatgatctggacagcatctgcttcataggcaatgccttcagtagctaggatattttccaaatggtgaacgatatctggcagtttgatggatttaaattcaaagcgttgcacccgtgacagaatggtcgcaggaatcttgtgcaactctgttgttgcgaggataaagactacgttttccgtcggctcttccagcgtcttcaacaatgcattaaaggcccctgtcgagagcatatggacctcatcgataatgtagaccttatgcttggctagactcggagcataagtggatttgtcgcgaatatccctaatctcatcgacgccattgttggaagctgcatcgatctcgataacatcttctagactcccattggtgatggattcacagatatagcagtcgttacacggctccccattgacttgattaggacagttcatagccttagcaaagatcttggccacactggttttcccagttccacgaggaccagaaaagagataggcatggctgatcttgtcctgctccactgcctgtctcaatgtccgtgccaccacttgctggccgaccaattggccaaaggtctggctacggtatttccgatataaagcttgatacattagttcttcactccaaacatcttaaagtcccagtttgtcttttcgatcaagagagcgacaaactcttctaaatattcttgatccagctgatcgtagtcggagacacattctgagtccaggtctaataccccaaggagctgaccgtccttgaccataggcaccacaatctcactcatagcccggctatcacaggaaatatagttagcatgttggcgcacatcatcgacaatcatggtttcccgcttttgagctgcttctccacagacaccctttccaagagcgatatggacacaagaaacacctccctgaaaaggtcccaggattaattccgtttggtcatacaaataaaaacccgcaaagaccgaacgaggcagggcttgatttaagagagcactggcattggacagattagccaaggcattggtttctccagttaagagagcatctaattgagccagcaagagctggtattgtgattctttttccgaatgtttcatacctcccattataccaaatctttgcccaaaaattaagcttcaaacaacgaaagaaaagagagtgggacagaaatcggtaattcgttaaaattcgatttcgtcgtcccacctccgaacagttgagtagggctgtaaaagctgatgaaatcagcgtagtagagcccactcaaccactacgtcttgctcgacaatccaaaaacaattgagaggctaggacttttgtcccagccactggaatatagataatgttatcttaaaacttttctcacggcggaaagtttcaatatattcttgattcattttaaaaatgaaatctcagttttatttctttgcagaatcatttaactcattcttctaaaaatgattttatctagtcatgtcgccgattgaagtgaaagacctcaaaatactgaatggcacgatagattaaaaagatagtcaagatgatggacaccagccagatggtctctaatccataaaactgaatcaagtaggtcgaaaaaatggccccaaagacgaaactcccgatcaagcaggtcataaagatagcttcccaaaggaatttcttctccttttctctgacaaaattcccataagccaccatggttttcttgagatttcccgtcatgaaggaatgattataggcgtagccatccacttctccaaaagaggtcgctacgattcccaaactcaagccaaaaaaaggcacgatgaagacattttttaccgatgctggcaaaaatcccgtcaccaaggtcgtgaggataaagggcaccaaggtactgaggcgccagactgaattgtcaatcaaacgccgcaaaaccgtcatcaaaaagattcccagcataaaggccaacatggtcgctaactttacttctacatctgagatctgctggccaatcaaaccaaccgatagaaagaccacatttcccgtctggcctgccgccaaggtcccaccccgacagataaaggtataagcatctgaaaaaccagcacacatggtcaataaacaagcgaacgccttggtccgcgaatgaaactcccttttcatttccactctccctaggaaaaagagggagtggtacagaatgttaaaaaccatttctcgtaccacccccgcaacattgattgagaactctttcgagcttttaggcgaatgacgagcctcaccaactactgcgacattccgtaattccaactatcgttattggattggagatcgatttccctctttctccctatttttattttccctcacgcgcttcgttgaggattttttcaatcttggttgtgatcaagtcaatcgcaactgtgttggtcacgccctcaggaatgatcacgtccgcataacgcttggttggctcgatgaactggtggtacatcggttttactacaccaaggtattgctcaatgacactatccagactccggccacgctcctccatatctcgcttgatccggcgaatgatccgcacatcatcatccgtatcaacgaaaatcttgatgtccatcaagtcccgaagacgcttatcttcaagaactaagattccttccacgatgaaaacatcttgtggttcctgacgataggtcttgctgctgcgcgtatgttcagcatagtcataagttgggatatccaccggacgaccctccaagagttcattgatctgcgcaatcatcaagtccgtatcaaaggcaaaaggatggtcatagttggtcttgatccgctcctcaaaggtcaaatgactctggtccttgtaataagaatcatgctcaatcatggcaatcttttcattcgggaaattagccaaaatggcacgagacacacttgtctttccaccaccagaaccaccagtaacaccaataataataggtctattttgcattttctactccattacctgtagtcgcctgaggtataatagacatctcagacacatcttatccattttaccatatttttgcctagacatgaatagtttttcagtaagaagtttggaaacaaaaactctaagcagcctcagcctgctaactcatgaaagaaaaaaagtgtggtttaaaataaaggtgaacaatagaattcctcggtcattaatagggctttgccctagttcatatgaaagtgccggcattaaaaaatcctcacacctcacaccaagaatacgacaaagaaaaagtgctaggactgaggcgacagttctaacaccaaaatttttaaaaatttcaattacagtatcgtacaagaagagtattttttgcgctctttttgatgtttttttcaaataaaaagtcaccgaatttggtgacttcattaggagattatgatgaaaaaagttttaggatttcattaaatgaaggttactcaataaaaatcgaattcagactaggcagagcgacgcaagcataactaaagttaagtaagtcgaatcgaacgaagtatggtgagaatttcgaagagtattaagaggtcttcatttaatgatgacaagatacatggacagacttaaagttagcttaagattttaaatccactactaacaattttctttaacagctgtttgacctgcaatccgtccaaaagtaaagatatccgtaagcgaattccctcctagacggttacctgcgtgaagtcctcctgcgacttctccggcagcatacaaaccaggaataatctgacctttttcattcaaaacatgtgttgaagtatcaatcttgagaccacccattgtatggtgaacagctggttttcttggtgttgcgtagaacggtgcgacctcacacttgagatcaaaactacccttgttaaattcagggtcaaatcccgcatccacataagaattgtactttttgattgtatctgctaaaacctgtggatccatgccaatctgaacagccaactcttctatcgtatctgcacgatagagagtgcctgctttgacttgggcatcgattttttcttggctagtattataggctgttgccttgatgcgatcatctgcaatcaagtagaacaagcctccattatcaatcgctgcttgagatagcttgtctcgactaccgtactcatccacaaatcgcttcccttcagtatttaccatgatgaagttagctggaggaacttgaagtcctgagaagagagctcctgtcactggatcggatactggcatcatttgactaaagcccatccccactagatctgcacctacactttgacctaagaggattccatctcctgttacagctggtgtattagaggtagcaatatcatccgcaatttcggtccagtaggtattgtatttttgtagcatcttagtattggcaccaaatcctccagaagctaaaacaacagcatctgcatgaacgaggatggtttgaccgtttcggccttctgctctaacacccttgacagtcccttcttctacaagcaattctttaactggagagtccgtcaagatcttgcctccattttctagaacatatttttgtagaaccgagataaaggcataacccatgggttgaaccggcttatgaccacgacgccaaagagctccaactggcattgtgacttcactacgaacaaattcaacaccgatgtcttccaaccagcgaacagactcaagggctcgttcggtcaatacagaaactaaatcatattgaccatgaatttcatgtccttgtaaatcttttcgttttccaccgatataggtttggatacggtaaagtaaagtagagtcaaacaaatagctagggtcctgcaaatactgctcaacctcaactttcaaggctctaaagtcttctaaatattctgggtcaatcgttgattcatctatcgcaatcaattcttgaagagtgtttgcctcacctggatgagcttcgaaggttctttgccatactggatctggtgcgttcattggaccacccgcacgaacggtatttcctccaattgctgggaatttctctacaacaattggcttcttaccagcttgtaatactgcagctgctgcagctaaaccggctcctccacctccgacaatgacaacgtcggcctgataagttttatcttctttatccaaggcagatggtgctttggaacgtttccgtaaaacatctggatttgcaccggcttgtttgaccgcacgtgcaactccgtccaagacaccatttgaagttacagaagcacctgacaccgcatcaacatttaaagtttgtccctcaatgatttctgctggaatacgagtgaaaacaacatctgcgattcctgaagattctccagaagaatcaatttcaattttttcaatacggtcctcagaaactgtgacgtccattggcaatttaccattatgtccttcagttgtaacgtgataagttcctggctcaaatcgaatttcttcaggaagatttagttggttggcaacagatacaaagcgaaggaaacgatagaaacaactatctaagaaatcgatagttcgctcatcaatcaaatctccatttgtatcaaatactcggtgagctcggccaagtaaaaattcacttcctggcataactgttgcatttacaccaggtgcatccaaaatctgacgaagatgaagttgggcacgtgaagaaccttgaacatcataagaagcccctacaatcatggttggttttccatctagtggatggatgttaaaagacaaccactcgatcaagctattcaaacttgatggaatcgtatgattgtgttcaggtgtcgaaataatcacaccgtctgcttccgaaatcgcttggttaaatttttgaataacaggtgtatctgtttgatcatcggtttcattgaacatcggtacatcggtaatttctaaaatctcaatgtccgcttttgacgcaaaatgtctttgcataaattgcaacaaactacggttataagattgtttggcattggtaccaacaatagctactaatttcatggattgtactcctttcttgagacgcttatgcttttaaccattcttcccagatgaatgatttcttacgttttgtatcttctggtttgaccaatgcttttgttagttcaacaaaattttggaactctgaaaaatgttcttccaactctgcaactttttcaggattgttcaaatgattgtcatcatccaatacttgttcagaatgacctaggagaaattctgtccctggcatcactcttgctttcagttcaggtgcatcaagaatctgacgcaagtgcgcttgggctctagatgttccaagcaatccaagagaagctccgacaatcatcgttggtttgttaatcaaagcgcgactagtgtaagcaatccattccaaggctgaagccaggggtgccggtatggtgtggtcatactcaggtgttgagataatcacaccatctgcagcaaggattttttctgaaaaagcttgaacttcggcaggtgctagcttgtcctcaggttcgttaaatgctggcaattgtttgatttccaatacctcaatgtcagctttatctgaaaaatgtttttgcataaattttaagagtttccgattggttgagcggtcagaatttgttccaacgatagcaactagtttcatcttgctaccccctttatttgtttgatttcatatctttaatatcattatacaactttggcctttcttgtaaatcaacagccctaaaagattgtgttatcctatcagtttatcttagtttagtataacttagtgaaaaaaataacaatattttttgagaaagtattgaccctcatttttaactatgttatagtctttgtgaaaatatgtattaagttagtggaggtttttcttatgaaagagacattcaatcgttggcaagttttagctgcatcaactgctattctcctctgtacaggggcagtctattctttttccgttttcgctgggcctctaagttcttcaacaggctggtcaatgtccgaaatcatgctcgcatttgcaattaactcagcaatcggaccgatccccatgattctcggaggttatttggtagacaagggatatgtaaaatggacaattgcccttggtgcacttctctttgctagcggcttttatctaactggttatgctagttcaccagccatgctctatctgacctatggtttgatggcaggtctcggtcaaggatttgcctattcaggagccctctcaaattcacttcgtctcttcccggataaacgtggcttagcttctgggattctaacaggaggtatggggtttgctgcagttatcgcgtcaccagttgcaagtagtctcattcaaaaacaagatgccttctttgcttttcgaacaatcggactagtctatattgttgttattatctgtgcaattttcttcatcaaagcagccccaagtggttaccaacctgcaggttggaaagctccagtacaaactaaacaaggacctgctaataaaaactggaaagaaatgctacaaagtccgctattttacattattatcagcatgttctttgtcggtgctttctctggtttaatgattgcctctcaggcatccccaattggtcaatcaatgtttggcctttcagctggaacagcagctctctatgtttctctttattcaatcgcgaactctagtggtcgctttatctggggatcactctctgataaaattggtcgttctcagactttattgattatctattcagtcatcgtattggcactcttctctttaacaattatccctggacaacttggtttcactctaggaatcctcggacttggtatctgcttcggtggtgttatgggagtcttcccttccattgtcatggagaactacggacctacaaatcagggggtcaactacggcatcgtctttacaggatactctttagctgcattttttgcacctaaagttgcggttcaaatggcagcagccaacaatggaaattacagtgctgcattctacgtcgctatcgctttagcagttgttgggctccttctcaaccttctatatatgaagaagaaaggctaaaaaagagaacttcctatataaggaagtttttttgatataataaaattagaaatagtttatcgggaggatttatcatggctcaatattcacgacttttacgagataacccatctgatttcccctacgattttgaaaaacaaatcttatctaagcaatcagctgataccatttatcattggcatcctgaacttgagataatctatgtcaaaaaaggaactgctaccttgtatatcaattctgagcgctttgaaagtcatgaaggcgatatttttctgattcagccaacatctcctcatgctatctacgctattgaaaatcaagaacaaatttctacagtttttcgcatccatctagatttcctaggtaggaatcaaatagacagttttagccaacgctatattcaaccaatatactctggacatttttatctcactcctcggatttcgccagacgatcatgcttatgaaccaattcgcgattgtcttttttctctcttttctatccttgaagaacagagtatttactacgacctcctattaaagtctaaactctatgaatttttctatcttctctttaagtacaggtatgtcaatcgacactatacagatgatacgtatcaaaaatatcagaaattaaaagaaatgattggttatcttgagcaacactatgcagagcccattcaaattgatcaccttgctacaacatttggatatagcaaaaatcactttatgaatatattcaaacaacacactgggacaagctgtatggattatctcatacgaatgcgtttagagaaggcttgtgaaaagctcgttcaaaccaatcaaagtgttcaagaaatagcaagccaggtcggctttactaacctctcaaacttcaatcgacaattcaaacagcattttcacttgactcctagacaatatcgaaaccaacaactcaaaaaagaatcctaaccatatctctccttagaatcttacttgggaaacttttctttctcaaataaaagggaccttgcagccctttcagactgaagaaaaagtccattttggacaattttcttcagtcttttttaaaaatagagaaagtaaaaactcttaagaatagcgcgatatcagcattcctaagagttttcactatatggtacccaacctacaaaatggcaatgtttctattgctggtagggtttgtctacgttctaaaaggaccttacggttctttcattatttcactttttctaattttgcggcaaattcattaccaccacgtaagacgagtatattttttccaccgttgacaggtacgaaacaataatttgaattagcttgtatatagacttccttagcgctcttcacttgatagccttctgatttcaccgcttcttgaattacttcaaatgtgtgttcgatctcttctttagaagtcgtgtctccatcatacttttctgaatcagctagagaatagaatgcgtaagccttgctatcgtaatacttatcactaataattccgtgatctgaaatctgaacagttgaattatctccttctgtcacatttttccattttccaaccatggcctttggtgtttcaaccttgtgatagaccaaattttcttcaaagtttccttcgtatgatttataagttttcaagtcgaataaatcatttcttaaaataatattgcttccgtctttttggagcaagttatagcgtgtgttcccaccagacttaataacaactatttctgtcgtcttcaggttaaacttcttatcgacatccgcaagtgaatgcaagtccgttgcatttaacaaagaaagtgctgtattaaattcttttttcgcttcattgcccttgagaacctttttgatggtctcgccaccattgactctttgtttctttccacttagttcataagtgaccggactagaatccgtatttctcaaccaaatcccatctagacttggtccacctgaaaagaaaaagaaccaagcaagagcaatcactgcgacaagtcccgcaaatgcggccccaatttgggcttgtttattgaaagtaaatgtcaatttttttggtcttgaaacaggttgcaaagttttcgccgatggctgcggttggacaaaagctgtctgctcttgtgaaagaggcgcactaggtgctacaggtgcttcctgagcaggagcctgcgcttcagttgctggagctggtgcctcagttgttggagctggcgcttcttttcgctctacgacaaactcccctttttcacgagcttcttgaaattcttgcatacttggcttgcgaccattgaccgcttcaaagtattcaacccaatcgttttgattcatcatatcccccttattgattcattataaaaactaaccatattataccacaaatccatggttaatttttttattttcagaaaaatatctgaaaaagtccaagcaattttccacttggactttcttcattatttcaaaactttttgtgttttcgcgtagttggcttctacagcttctttttcagccttccaccaatcttggttttctgtgtaccacttgatggtgtcttccaaacctgcttcgaagtttgtgaattgtggttcccaacctaattcttcacgcaattttgttgaatcgatggcgtaacgcaaatcgtgaccagcacggtctgttacacggtcgtaggcatcttttggttgacccattttttcaaggatgagctcaagcacttctttgttgttcttttcaccatcggcaccgatcaggtaagtttcaccgatacggcccttagtgaggatagcccaaacaccagttgagtggtcgttggtgtggatccagtcacggacgttcttcccttcaccataaagttttggcttgatgccagacaagatattggtgatttgacgtgggatgaatttttcgatgtgttggtatggcccgtagttgtttgaacagtttgaaatagttgccttaacaccaaatgaacgtacccaagctttcacaatcaagtctgaagcagccttggttgatgaataaggtgatgatgggttgtatttggtttcagcagtgaatttttcaccaggaccttccccatgtccaggaagatcttcgcgcaatggaaggtctccatacacttcgtctgttgacacgtggtggaaacgaatgtcgtatttacgagcagcttccaagagtgtataagttccaacaaagtttgtgtagataaatggagatgggtctttgagggagttgtcattgtggctttcagccgcatagtgaacaatagcatcagccttgccagccaatttgtcaactaattcagcatcagcgatgtctcccaccaccaactcaacacgatctccaaggatttcttcgatattggcacggttaccagcataagtaagtttatcaaggacagtcacatgcacgtctggatggttgttgtagacatagtgtacgaagtttgaaccgatgaaaccagctccaccggttacgatgatatgtttatattctgacattttttctccaaatagtttttagttttgattgttcctttagctagtgagggacgccaacaccccttcggtttcatggctcaattggaagccgaagtctccggatttccctacaagattccctgaaggaatcttgttttcactagggcaggaacaatcttataacgctccttgcagtcgcgatactgctatgcaaggttcattcttacaaatcttctgcttttaggggtttaacatctttgagcagtgggtggttcttgtctgcttctgagacttctgcttcttccaagttttcccattggatgtctagacttgggtcagcgtagttgacaaaagcatattttggtttgagttccagtgcccagtaatcattaactaagtatgtataagcaactttgtctgtcaaaacttggaacccatttgctacaccacgagggacgaagatgccttttgaagcatcgatcacggtttggtaggtattcccaaagctatcgccttcacgaaggtctacccaagttccaagaaccttgccttcatctgctacagagatgtatttgtcccaaggctctgcatgcaagccacgcaaaacattcttacgagagaatgaaatattgttttgcaacttaccttctgcaaaaaagctttcagggaagccaagaggaagcattttctctttttggaagttttctttaaaccaaccacggttatccccacgcactggaatatcaaactccatcaagcctgggatagcttcaattttgcgggctgctaattctttttcgaaaaattgttctgtcattaagcttctccaatcaaacggagcaagtattgtccgtattcgtttttcttcagtgattgcgctaattcatggacttgttctttgttgatataacccatgcgataggcaatttcctcaagattagccacttggacattttgcaagcgttgaacagtttcgatatattgagatgcttgcaagagactttcgtgagttccagtatccaaccaggcaaaaccacggcccatgagctcaacagagagatctccacgctccaaataggccttgttgacatcagtgatttcaagctctccacgagggcttggtttgatgtttttggcaatttctaccacatcattgtcatagaagtaaagtcctgtcactgcaaagttcgattttggatgttctggtttttcctcgatagagatagcattcatatccgcgtcaaactctaccaccccaaagcgttctggatctttaacttggtaaccaaagacagtcgctcctttttctttcgcttctgcccgttgcaacatcttggttaagccatttccgtggaagatattgtccccaaggatgagggcaacatgatcgtcaccgataaagtcttctccgatgatgaaggcttgcgccaaaccatctggacttggttgctctgcataagagagagaaattcctagttcagaaccatctccaagaagctcttcaaaacgaggaaggtcttgaggagtcgagatgatcaggatttctttgatccctgccaacataagggttgacagcggatagtagatcattggtttgtcataaatgggcatcaactgtttagaagccgcacgtgtcaatggatacaagcgagttcctgagccccctgctaaaataatacctttcataatgttaggcctttctacgtagttattacccttattttatcatgtttatataaaaaagtcaccttgcatttgtgttacaagatgacatcaaatctattttccaattttgtcatatttggataacatattggggatatacatatctaaactcttacgaaattctccctgaattgcagtatcaatttgtccctgaatagtagaaattgttgttttagtttcatccgcaattttaattgcttctttttgaaattccttcataaggttatcccttacttttagtgcaatctttgcttctgctatagctctttgacgttcggttattctcctcatttctttcaatgcaaattcatattctctatctgtataatattcatctattggcgctctcatggtccctcctgagttggttatactctgtttctaatttgtttcttctttttataaattcttttgcattcttctcaatttctatatccaattctaatattttttggttaaatacttcctgcgattgagccattaaattatctattattgaaatgtactccttcgcttcagaaacaggaactgaaaacatacttaaagagtaattaaacttatctatctcatcaagtaaatatccttcaagttgtcttaatttgttatctaaaatatatccttgctcctctaaatactttgttttattattataaaaatactctagttcggacaattcggcttctttttgacaaattttttcccaaattacatctttgatttccatttatcaaaatcctttgctaaattctcatcattcatcacaactctatccattcctgactgaatcagactatgcagtttttcaaaagcactggcagaatcagacatcttttcaacttcaaaatttgttctactttgaaaatccgtaacatacttatctcttgtaatgccttgagaagcaaatattgattctacctcttcaggagacaattccgaataatttgaaaaatcaattttcaaccacaaatcctctatatccttattagctttttcagcaagtttcttaacccactctgcagcaaatcgagcggtggaaagcatacctgatgacaaaatctggccttgaactgcatctaaaaaaatttgttcacgaccgtcaataccatttgatagccatttttgtttcactttcttatatagatcaatttcacgtagactattcgcatacaaatcattaaaactactaactagagaagcttttcctttgctagcaataactttacctgttaaagggtcaaatatccaatcatttattttatgactgcttccatctagccaataaatattatcaggattataagataaataaatattatccgaactatacaattcaggatgatttaaatcattccaaaagacaacactatcatcccttttacgataatctacaaacatttctttatttgatctaatatattctctttcctctttagtcaatgatttatatttaaaccacgtattaaatgttgttgttggaatatgatattttgcacccaccttaagcatatatgaaccttgtgaatagcctgataatttacttacctcatatcgaggatcttcaataatttctttaacaaattgatcagctacttgatattgtggtgagatacttctagaagctcctaatgcaccagcaacatctcttgaaattaaaccaccagccttattaaccgaactatttggatctgttccagcagcaatcacagcaacactttgataatcaggctgaccattcacaattggcgcaactgctagaccatcaaagccagttgctgaatcagatttagtcgcaacaactaaaaactcctgaccatctgaggtggtgatcgtatttatttcacctttctttaactcattatctggtttagcagtgacaattttcgttctgttttccttactctgtgcgaactcaggattaacactataaacgtttggtccttgatttaattcattaagttgcctatctgtatacatatacgtactcatcactgctcctcctctgaaccatccgaatatcttacttttactctcgatttagtagagcctcttctagaatccataaagctctgaaactcctcatcttcattattatagacccctatcttaattttattcgcatctttatcataagctagtacatgttccttggaactcccatcagaaaatgtaaattttacatctgctccccatgcatctgagggtatggagctgtatgatgggttcttaatttcaatctcctcaattccttcatacgaatacttcaaaaccttcacgagactgatttcatattctttgttacggtgctcttcttctgactttttggtcaagttaaacatataaatccctcctacaacaatagtagtcaataataaggcataaataagtagtttaattaattttgtaaatttaaattttgccatttaatcgtttctcctttttgctattataccataatattttgttacatctgacgtaaatatgacaaacttttcttcagccttattacctcacatacaatgataccaatcaaaaagagagcttgtcctgatgctctccttttctgttccttatcccaaagcgacgtctaggatcatcataatgacaaaaccaaccatgaggcctaaagtcgcaacgtctgtgttgccattggtctgggagtctgggattaactcttcaaccaccacgaagatcatcgcacctgccgcaaaagaaagggcgtaaggcaagatagccgtcatagataggactgctactgctcccagcagagctccaatgggctcgacgatagcggacatggagccccaataaaaggcgttgagacgagattttccacctgtccggattggaatggaaagagctgccccttctgggatattttgcaagccaatcccgatagctaagccaaccgcaccgataaaggcttctggacttggattgctcgccagggccccaaaagccactccgactgctaagccttctgggaaattatggatagtgatggcgagaaagagtagggttgttttagacaacttcttctcccgcggcgtatggatactctcagcctcttcaatctccttcgtcatatgaaggtgagggacgatggcgtcaatcaagcgaaggaaaaaacctccagctaaaaaaccgatcgcagccggcaaccaagccaggctcccataagaggtttccgcatactcaatcgagggttgtaagagggaccaaaacgaagctgcaatcatggcccctgccgcaaatcccatcatgatgtccagtaatttgcgactaatattcttgaagaaaaagacgatggctgacccgacaatggtacagccccatgtaaacaatcctgcgagaaaggcctgcaagaccacggattgtgattgaaatcaattcataacaactcccattttcttgttgattcacttcttctattctactatttttagcccaatcccaattaaggaaggtcttgcgaaaaaaagagagtgggacagaaatcggtaattcgttagaattcgatttcgtcgtcccacctccgcacagttgagtagggctgtaaaagctgatgaattcagcgtagtagagcccactcaaccactgcgtcttgctcgacaatccaaagacaattgaaaggctaggacttttgtcccactctcttcttcacatactgttcaactggataatctgctggatctaagcgcaggtttcctcctaccacgagttgggctaggtgccacccaatgaggggacctattgtgaggccagacgaaccaagtccactggcgacatagaggcctgctcgatcaggaacagctccccaaaatggtgaaaagtcactggtgtaggcacgagttcccacgcgctccccgataacttcggcttgagcgagttctggatagtaagacagggcttctgtttccatctgattgagcagaacttgatccactgtcaggtcaaagcccatctcattttcatgggtagctcccatactgatcttgccctgctgaaagggaatgatatccagctctccttcaggcatgaccaccggataatcatcagtatctacatctagctgataatcccgcagttgccccttttgcggacggacatcaacttggtagccaagcgactcgagcatttgccccaaccaggctcctgttgcaaggataacttggtcatagctttctcctgcaatctgatagccatcacttgagactgagagagcaacctcttccttgatcactcttgccccacttgcctgaagaagggtttctgtcagaagagctccttctacatgggctccacctgaggcatagagaagcttctcaaagccttgcagacctggaaattgctgggctacttcttccttagtcaaaattgccaagtccccgattaagggagattcttctcgtcgactcagcgccaactgatagagttcgtctaatttttcctcatttttcttcaggagatagacgccggtctgctggtaaaaatctgttttaattccgtccttggccaggtcttctaccaattcttggtaaaaatctgctcccagacgagccaggcgataccaggccttgtttcgccgtttggaaaaccaagggctaataatgcctgctgccgccttagtcgcttggccgactccatggtcatagacggtcacatccacttgtgcttctttggataaataataggctgcagtggaccctacgatccctgcaccgataatggcaactttcatgatgcccccttagatatgataaaaaggattggtactggcttgactgccaatcacttcaatctcccacgcttcctcagccttccactgattgagcttttctactagtttcgagacaaagagaacctcgatatggtgacctggatccaaggctaggaggccatcgctcagcatgtcctgagctgtgtggtagtagatatctcctgtgatataaacatctgctcccttggcgagagcatccttgtaaaaggactggccacttcctccacagatagcgacacgctcaatgaaccgttccaaatcagcatcatcataactaaccaagcgcaaagcatctaaaccaaaggtttctttgaccttgctagccaactggccaaaggtttgagcgggtacccgaccgatgcggccgattccgagctcttcccctgtcatactgaggggctctgtattttcaatgtccaagagctggcagaaccaatcgttgaggccatctgggacaatgtcaatattggtatggctgacgtagaccgcgatatcgtgcttgatcaagtcaatatagatctgattttgagcccgatcggctaccaaatccttaataggtcggaaaattggcgcgtgcttgacgataatcaagtccaccccatgggcgatagcttcagccaccgtctgctcgcggatatccagggccaccatgaccttatggatgtctttttgtagcgtaccgacctgtagcccacggacatctccctccatggatagttcctggggacagtaggcttcatagcgtttgatgacttcacttgctagcatttaggacctccttgatttgagcgatgcgttcttctaacgaacctctggcggcttgattctcaactgggacctgctccaagacaaaggctaatttttccacttccttggaccatttttgaacaaaggctggagcttgctcctccatcaaatggggaccaaaacgcaattccttcgctgtcaagtcttgagaaccatgctcgaccacaaggatctcataaaacttctcattttcttctaagatggcttcatcgacaatgcgaaaatcatggcctgccaaccaagctcgtaattcatcctcccgattattgggttgcaagaccaagcgagagacaccggctagtttctcaagtcctgccgctaagatatctgcaatcaagcgtccgcccatccctgcaatggtgatgcaagaaatggcatcggacggttcaaaagcagccaagccattggccaggcggacctcaatcttgtcttctaaaccattatcagcgacgttttgcagggcggattgataaggcccctctactacttcccctgcaatggcagcctcaattctcccttcttgcaatagggcgatcgggagatacgcatggtcacttcccacatctaacagacgcgctccagctgggacgaagctagccaccaagtccaagcgatttgataattttgtaaattccatgtgctactttctaaacttttattccaccctttagtataccatgttatcaccattaaaaaaaggcgcaatggcgcctttttcttatgcatcaatttccttatattctacttccaagccacgttgcacagctgggcgattggcaattttctctgtccaagcttgcaaatgcttgtattccttcacatttagaaaaattcctgctcggtcccagaccttgtcttgtgctagacggccataccaggaccagatggcgatatctgcaatggtatagtcatcccctgcgatataaggtttatttgcgagttccttgtccagtaggtccaattggcgtttggcttccatagcaaagcggttgatggcatactcgattttttcaggaacatagtggaagaaatggccaaagcctccacctaagaaaggcgcagcccctgtttgccagaagagccagttgagcacttctgtccgtttagcaggatctgtcggaagcaattgtccatatttctctgctagatacaagagaatattggctgattcaaagacccgaatggctggatctcctgattgatccaacatggctggaattttcgagtttggattgatggctacaaagtcacttccaaactgatctccctcggcaatcttgatccgataagcgtcatagcctgcatccacacccagctctttcaattcctctagcataatggtggccttgatcccatttggtgttggaagggtatagagttggaaaggttgatcgccttttggaagagtttgttcaaagcgggcacctgcagttggttggttcaagccactccaggctcctcccatttggctcggtgcttcccatacttctggtaattgatagtctgacatcattcttctcctttatttcgctactcctagcatatcaaatctcgggcttcctttcaaagatctgctacgtgaaggctacttgactttttttgtcaaaatgatagtatagaaaaaatacaattttaaggagaaaaccatgtccacgatcgattttcatagtttggcaaagacagaacttcactgtcacttagacggttccttgtcgcttccaatcattcgccagttggcagctatggccaatattgacctacccgctagcgatgaggagctcaagcaccatgtcactgctcctgcccactgtgagaatcttttggactatttggaggcatttgattacattcggcccctccttcaaactaaggaagccttgacgcttgctgcttacgatgtggccaagcaagctgctctagaaaacgtcgtctacatcgaagtccgcttcgcaccagaattgtccatggaccaaggcctcaccgttccagaaactatcgatgctgtctgcgatgggctacgccaagcccaggaggaatttggcattgttgcaaaagccttggtctgtggcatgcgccagtccgatcaagaagtcacatctcgcattcttgcagaagcaaaccaagtcagggatcaggaatttgtcgggtttgactttgctggggatgagcacaactactctccagaagatattcgacctttaatcgagcaagtcaaaagttaccatcggccgatgacgcttcacgcaggtgagtgtcattgcccacactttgtagcccaatcgattgcttttggcatcaaacgcaatggccacgtgacggctctatctcatgaaccagccctactccagtcttttgttgaaaatgaagtcaccggtgaactctgcttaactagtaacttacagacaaaagcagcaccgactttagaagatttcccttatctgaagatgaaggcagctggtgctcggatcagtatcaataccgataaccggactgtatctgataccgacctcaccaaggaatacgccctctaccatcagcatttccaaaccaaggaaactgacttttaccagcacaatgtcgatgccatccaggcttcctttgccagtgacgaggaaaaacaagaactccttagaagactaaaaaaagcctacgcagactatctataaatgcaaaaactagcacttttataaagtgctagtctttttctattttgatacggattcatacacggccatatcctgtggagtcaataagccagtgtaaaagccatcaacattgatcgcagcatacttagttaggctctcataggtttgaatggtatgaacatagacccgttttccaagtttatgtacctgttcgataaacttaggagttaagcgagaatcgtcgatagggacggtcaccgcctcgatttccttgtgcttggcgataaaatccagtacttcttctccactatctggtgaggcgtagagcgtatagatcacgtgcttgaaaggataaatagattcgatttctccgaacatctcttgatgataaatttgtggaatcacacgatccaatagttctttgtctcgcttgtttgcttctgaaacaagttctttaaattgtgtaatcctatcttccctagggatttccatcgatttggtatctgtcaccaacaccatatctcgattaattatcatttgatcaaacacatcccctattaacatggtcgtaaagcgacttggtgtttctggggaaccataaccctgaaatttcttccattccttagaagaaggtgcgacatcatctttgtttccaaaatagtgccaatcatgaactgcagctaatttcttgtcactagtcaaattaaaatccatttcaaacaagcgatggccgagattgtaattttgccgtaaagcctctaaggaattggtatacttcgtattgtactccttctcccggaccgtccctccagcgtgggctattagtcttggagaaacccttagccaatctttcttattaaccttggtgtactgcacgaaaccatattggttagacagctggccattggtcaaacgttcaagtgtttccttatccacataggttttcttccagaaagttgtctcttgatgggctttaaagcgataatgatttttatcaaatacctttgtttttgcgttccactggatgtcaatgattacattggcatcttttttacgaaatcctgtcttcgttttggtatagccagcctctagtagagtctcttctactgggtacaggcccgaagttaataggttggtccgtacgtagtaagagctgatcatgccaaacaataaaaacaatccgaccactaacatagtcggatagagccatctaaatcgtctgcgtctgtttttatctccccatttcaattgatcaatcgtctcctcttaatccttccacaaatccatggccttcaagaaatcgtctgaaaccgttacattgcgtgggttggtttgctcacgttcttgtagtttcgcctctacttgggccaggctgttgatgccttcactgcgccagttgcgtaaaatggcttggatatatttccagtgaggcttgccgttaaagacagcttctcgtagggctgccttgatcacatctggatctgtctgatcttcgcgcacggtcttggtcaaatcttcaatctcaaaaggcgtcaagagtcgtcccagttcttgttggaaggtttccaccaaatccttgatgacatttcccttagcaggcgcgctctgtgccttcccttgtgtctgggcttctataatctcatccaagcgctccagagcaatggtcgcatcaaaaatagcttcaatctcgccattgagctcaatggtccggtattgaaggagtcccttggtagtcaaattggacataatccgattgacctctgtcaccgtttttcctagatgactagcaatctgattaggtgtcaaagcctcttggccagtcgtattttgaaggaagaaaaactgccaaaccaagtagtcatctgcttggtcaaacaactcatgataatgaaaaagcaaggcacttggaagaaccaagttgccatacttaaatgcttgtgaatatgtcataattcccctttataggtaaccataaaatgaaatatctttttccaattcttccaagcggtagggtgtttcttgataaaccgcatagttgatccaattactaaagaaggtcgtcgcagcaagattccaacgaatgcgaggctctgtattagcgtcatctccatcaaaataattcttgggaacgtccggatccaagcccgccttgacatctcggtggtattcttttgccagcgtatcgcgatcatactccagatgaccaaaactatacacctcacgcatatctggactagcaatgatggaaaggccaacttcatttccctgagcgatcacttgaagattgctcttttcaaggacttccttcaaaggaatatctgtatagcgagaatgaggggcaaggaagcgatcgtcaaagcctctcatgagcagactttcgggacgcaccactgcttggtcatagataccggatagcttgtcacagagttctactttttgaattccgtaacggtggtaaagaccagcctgggctccccaacaaaggtgcaaggtcgaaaagacatgccgcttagaccattcaaagacctgggttaattcttcccagtagtctacttcctcaaagtccatcttttcgacaggagcccctgtcacaatcaagccatcatagtaattatccttgatgtcctcaaaggtcttgtagaagctctccaaatgctctgctgctgtattcttggattcatggctcgtcatatagaggaagtctacattgatctgcaagggcgtgttggcaaggagccgtaagagctgggtttctgttgcaaccttggtcggcatcagattaagaatgagaacattcatcggccgaatatcctggtgagtcgcccgaacatcatccatgacaaaaatattttctgaacgaaggatatcgactgctggtaattttttatctagagtaattggcataaaaagctcccatcttacaagttcttaactaacattatatgataggagcttatagttttcaattatggtttttctgtagccagttatagtattagactatattagtaatgcatcaagactttgtagtcgtaatcgccgatcgcttcgcgacctttcaagtcgtccaactcgatcaagaaggcacaacctgcaacaactccaccgagtttttcgatcatttcgatggttgcttttaccgtaccaccagtcgccaaaaggtcatcaacgatgaggacacgttgacctggtttgatggcatctgcgtgcatgcagagggtatcaacaccgtattctttttcgtagtcagcagagatgacttcacgtggcaatttaccaggcttacgaacaggcgcaaatccaattcccaactcaaaagcgaccggacatccaacgatgaaaccacgcgcttcaggaccaacgatcatgtcaatttttttatccgttgcgtattgaacgatttcacgaatcgcataactataagtattgccatctgccatcaaagggctgatatcacggaaggtaattccttcttgtggatagttttcaatgcttgcaatgtaatcttttaaattcatggttaactttctttcataaaaaattttttacattccattatatcatgaattctactaacttgcatcattttttgccaaatcattttcccaagctcccgcgtcaaaagcaaaaatcccacatccaaaaaagatgtgggattggaattggaaacatgcttactattcttctaatactttattgtacataattttcatgtcccccaagtttttcaaggaataacgggaacttccattcttgaaccaagtaccaagaatatattgttcagcgaccttcttgctttttcaaccaagtacggtctttgccgtaggcggcaagtttctttagaaaatcactaccctctacttcttgatcatctgcataaagatagacatccctttggaggaacaccttatttgcagaatcgtatttgaaagacatacgaacgtatgcattttcgttcaactgatatttataccaataaacccactcagaactgtcccggaacatcatgacggataggtcttcttgtctcccaacgatttcatctgaataggggtaggtttgaaatccttcatcatccttccagataccatcatttcctattgtttctgtaaagggcttaaacatcacatagcgcatccatccaccattttcggcatagttgatttcttccatgggattcttgagactcaggtagattcccagctaaaagcagcaaggggctgagccataggaatttttttaggtgtcttttcatgaggcctgacctgtcaggtagtcgtagatttcacgaaccgttccaagagccatcaactcctgctctttcaccgtttgtttgaggttttggtagatgttgctttctgcgatctctcgtttttctgcttctttattgaccttcatgataccattttcaatggtcacgaagcccaactcttggaagatctgaatcattttgaccaagaggatctgctggatcttgagataggccgctaggtctttgagtttgtagcggacatcgaactctgggtactgatagatggtcttatagagcttggcatactggtccctgctaccgtatcctgtcagatagtaggctttggcgatctcatttttgaaataaacggcctggaaatcatgctcttggaagattttccgtaaggactctaaatcctcaggaatatttccaactacaacagcgggctcgcctgtaaaatctggcagttctttagtaaaatcaagaacgggaacacctgcggggaggctagcatttttggagcggatattaaagagctgcacgccgtccacacgcgcatcaaccagcatgagctgcagggttgtttggccattccattggttgaccgacaactgcacagctagctctaggtcttgcgcctgtgcaaactctgcctctaagcttcccaagccaaaggcaaccacctcaaaggtcgcatcttcttgagaaattttgagtttcaaatgggtattgccggctcccatcgagcgcgccccttctaccttgaagttacggaccagaaagaccggcttcttattgtccatgccaaaaggactcaagcgatcaaagcttttcaaggtctcaagcgttagttctgttagatgcagttcctcgtcgatggctaagctagacttgctgctgagatccacctcttgttctgcaatgtaatccgtaagagcctgagacaaggcagggagttggtccacctcaagcgtcatccctgctgcaccggcatgccccccaaaagcgacaaagagcgaccggtggggatcgagggcatcaaagatattgaccgactcaggactccgagcgcttcctttagcccgtccatcttcgatacttaaaacaacgaccggctgatgaagctcttctaatagacgaccagcgacaatgccaagcactcccggattccagccttccctggccaagacttgggcagacaaacttgggtcgaccatggttttggcttcgtcatagatagcttggacgatctcttttcgttcttcattcttttgatgaatcatgagggcaatctcgtgcgcctcttcatcgtcaaaacctgtcaggagttcaatggccggattgggatcatcaaggcggccaagggcattgagacgaggagcaatctgaaaaccaaccgtttcttcattgacatcctccggacgaatccctgcgatctccaagagctcctgcaagcccatgcgctgggtatgttggagaacacccagaccgtatttgaccaggatccgattctcatccgtcagactaaccatgtcagcaatggtcccaattgctaccaggtctaagagatcgactggtacttcctctaagagggcacaggccaacttaaaggccacaccacatcctgctagataatggaagggataatccgcatctggattctcgggatgaatgatcgcatatgcatccggtaaaacctccggcatagagtggtggtcggtcacgatgacatcgactcccattgcttgggccatggcaatggcttgattacccgccacaccattgtccaccgtaacaatcagggaaatgccttgctgctcgataaagtatttatagacactctcattgggaccatagccgtctgtaaagcggttgggtaggtagacttgcacctctgcccccatctgctccaaggtttccttcataatggaggccgaggtcatcccgtccgcgtcatagtctccgtagatcaggatctgctcataatcttcgatggcccgtcggatgcgctccactgccttgtccatatcatggagcaaataagggtcgtgtagcttctccagcttgggttctaaaaagtcttctaaatcctctttggtctgaatgccacgctcatacagcaaggttgctacggacgcttccaggcctgcttttttggcaagggctaaaaaggcctcatctgcacttggcgaagctaactgccaatcgtattttgaagtgatcatctagcttttggtctcctctttttcttatctgattattatatcatgaaagcctaaaatggcggaaaataaaaggtcaggtaatagttggaatatttgaaaatacaaaatatttaaaaatagttgctatcgtattacttagctctatccctattcccccttttgtcagccaaattgatagaggctgggacaaaagtcctagcctctcaattgtttttggattgtcgagcaagacgcagtggttgagtgggctctactacgctgatttcatcagcttttacagccctactcaactgtgcggaggtgggacgacgaaatcgaattctaacgaattaccgatttctgtcccactctcttatttcatataaatcatccctgtacaggcttgctctgaaagttcgacaaagccgagggactggtaaaaggctagatttttctcgctacgttcagtggcaagaagccgttggtagacatttgggaaggtcgctaaagcctctgttaagagtttctttccaatgccttggcgctggtgatctggccgtaccaaaaggtcctgcacaaaaataacagagtggccatctcctaccaagcgaatgtaggcgacgagctctttctcatcatagactgccaactgccagagactggctttgacagcttcttctagcatggttgggttgttggtataattagtccagccgactgagctgtacaatgcgagtaagtctgccatcgctggattctcttgtttgtaatctaacatcttaactcctttttaacgtataatgctggaagaaggcgatatcccggtaaggggactcttgacagaccgccaactccatcttgagcatagactctcgccagccttcttggcccttgaagcgattgtcctgtaaggcataaaagacacggatcccttggtagtcctgaacttcgagggctagatcttcaacagctagatagagatcataggcctgagccaagcccatggagtgggtttccagatcgtggcctgctagcaaatcgagagccttctgagtatcattttcaaaaactactgtctgcaggacgcggccaacctcattgtgcttgacgatagagagcaggccacctggtttcaagagacgggtgaatgccttgagaaccaccttgcgatcctctacatactccaagacattgtggcagaggatgacctcaaagctggcctcttcaagacttgccaactggtccatacttccgacgagttgctggtagggatggtcctgagcccgcaaagccaccatttcctcattaggttccacagcaaggacttcattgtcttgcgccaagtggttagctacaaggccaaaaccactgccaaaatcaagcactcgcttccccttgatgtcctgtaattgttcaaaaaggatatcataatagatctgtccccagggttgctggaggttttctaaataagcttgaatatttgcagccatcgatctcctcctatttgaagttgaacatcttgctggctagcttgtccgagatgcgtgggaaaagaatatagagcttgtgggtcaggttcaagagccaaggcaaattgagctcgcgttttggttttccaaagtttttcacaatcttcttagccacgaagtctggttccaaaatataacggtctacagccttgacatagcttccatctgggtctgcctggtcaaagaaagtggtccgaatggggcctggattgaccgtcgtcacatggacaccaaagggcatcagttctaaccgcagggcattggagaagccgatggctgcaaacttagtcgccgaataaaggctggatttggctgttgcgacgagacctgccatgctgacgatgttgacgatgtgccccttgcctgcttccttcatgtgcgcacccatcaagcgtgaaagttgcatgagggcaaaggtattgacctcaaacatctcctgcacctgctggtcagaaatgcgatcaaaggcctcaaaaatcccatagccagcgttgttgaccaagatatcaatctgtccgtagcgctgataaagctcttctaccaaatcttggacggctgaggaatcagtgatatcgatcccgatacattcagcttgaggatgactggcatagagttgttccagtttttcttgatttctacctaggagaatcagccgatcttcagggaggagcttgaccatttcttgggccaagcctccacttgctcctgttatgagaatggttcgcatcttagatctccacttcttccaaatctttgacgacatagacattttcaaaaatgctggacgcatccttgcgcaattggctgatgtcttttgataagaagcgagcactgatgtggttcaaaagaaggcgcttggcccctgcttcacgcgccacttctgctgcctgcatattggtcgagtgaccgtgtttcttagcaatcttctcatcgcccttgccataggtagactcatggacgaggacatccgcattgactccaaggcggacgctggcatcagtctttctggtatctccaaggatcgtgataatcttaccaggccgaggggctgaaatataatccgcagcaatgatcttagtcccatcttccagggtgacatcttgtccatttttgacctggccaaagagcggaccaaaaggaacccctgctgccttgagcttgtccgcatcgagtgttccttccaagtccttctgcatgatccgataacccacgcagaaaatggtatggtccaaagcttccgcgtaaaccgtgaatttatcagtttctaaaatcttacccagagaatgttcatcgaattcatgaaaatggatgcggtaaggtagccgagagcctgatacgcgaagactagtcatcacaaaggatttgattcctactggtccatagatatctagatccgtctgctcttcattggcctgaaaggcccgactagagaggaaacctggcaaaccaaaaatatggtctccgtgtaggtgagtaataaagatcttgctaacctttcgcggacgaatggtcgtttctaaaatttgattctgtgtcgcttcgccacaatcaaagagccagacttcattgatctcatctagcaatttgagcgccaagctcgatacattacgggcttttgagggttgcccagctcccgttcctaaaaattgaatctccattgtctactttctatctatataaatcatggccgtccggttctctgaacggaacgaaaggtcgccagggtaggcttgcgctagctcgaggagctcttcttggttatatcctgacagtttcaagcgtccatcttccaaggtcatcaagtcagtcagggctgagagggcttctgttttggtgaccccttctggttcagcctcttgcaagcagatcttaccatctttttcaaaaaccaaacaatgtggaaagatctctgcgatttcaaataaaatggcaggggtgatatcctctgctgggtgttcagcaaagacacaggctagctcttcatttacgtaggccaagccataagacttacctgataaattgaggcggataaatggctttcgttcatcaaagctttgctgaactgtgaataagtcaaatgcccgactcaagtccaagaaataatccattgcctccttggggctcttcttttgatagagctcagcaaaataggcgttgatcacacttgggggaggcgtaatcacacggagacgcaattcctcagggatcgtgcttaaaagattggtcagatagacccgatcgaggctggtataacctccatattttattgctaaatcaacgtaatccgtcataaaattcttccaacttccacttatttttctctgcgatatagccttgaatgacctcgacatcctcttcaaattcgcgctggtcaatgatcgctactgtttctagatcatgtgtccgataagattttgaaaagggaacgcgaatggtaaagggaacaaagagttctctcaatttttctagaagcaaagcctggagatcttcacgggctgtctcagagcgcgctgaaatcaagctaaaaggtgtctgggttggggtaaagtctgctactttatctgctttgttgtaaagcgtcaagcgagggatctccagcatatccaggtccttcatgatcgaaagcaccgtcttttcatgctcttcatgattgggatcagacgcatcgatgacatggaccaggaggtctacattcttactttcttccaaggttgacttaaagctcgaaaccaactctgttggtagatcttggataaaaccaaccgtatcggtcagcgtcacttgcagattgcctgttagatggatgctcttagttgttgcgtccaaggtcgcaaagagttcatcggcttcatactggctcttactggtcagctgattcataatggtcgactttcctgcattggtatagccgatcaaaccaatcttgaagacaggtgattccaagcgtttttcacgaagggtttcccggttcttttcaactgccttgagctggcgctcgatatcggtgatttgattgcgaacgctccggcggttcaactccaactgactttcccctggaccacgagaaccaattcccccagcctgacggctgagcatgatcccttgaccgacaagacgtggcaagaggtatttgagctgggccaagtgtacctgcaacttcccttcatgactcctagcccgcatggcaaagatatctaaaatcaactgcatccggtcaatgaccttgaccccaaggatttcttctaagttgacattttgacgcggtgtcaggcggttattgaccaccacggtcgtaatctcatctgcttcgaccatttgagagatttcttcgagttttcctgagccgacaaaggtcttggtatcgtatttctcccgcttttgtgtataggagccccggacatctccaccagctgttttagccaggctcgccaactcctccatagacatgtcaaaattgtccatgccttgaagttccacaccgaccaaaaggatgcgttcttgttttttttctgtttcaatcatgctgtaaaaactcctttacatctgcaagaacctgctccttgaagtggggggcagaaatggcgtaaaattttacttccatccgatttcgaaaccaggtcagctgccgtttggcaaaacgacgcgtattgcgcttgaggatctcactggcttccgcaaggctctgctctcccttaaagtaaggaaagagttccttgtaaccaatccctttagctgcctgaacctccggatggtcatcatagagccaccgagcttcatccagcaagccctcctctagcatgcgatctactcggcgattgatgcgctcatagatcaaggaccgttcatcatctagacagatgagatagggttcataatcggtctcttcgtttgcgaggtcctgcccaaaatgcgcaatttcaagagcccgcatggcccgacggcgattgagctgaggaatcacaactccttgctccgccactctttggtacaagtcttcatccgacagcaagtccaattgagcacgataggccagaatctcttcatgaggaacttcaccacctagatgataaccttcgagcagactttggatgtaaagacccgtcccacctgcaatgataggaagcttgcctcgagctgtgatatcctcaatcgcagtcttagcttctcttacaaaatcaaaagccgagtaagactcggtcacctcccgcacatcgatcaaatgatggggagctgcaacttgctcttctggtgtcgccttggctgttccaatatccagcttgcgataaacttgctggctatcgccactgataatctcaccattgagagcttgtgctaaatcgatcgcaagagctgtctttccaacagcagtcggtcccacaatcacaattatcttggttttcatcgtttttccttgcaaaattcacgttttttcgttaccatatattataacataaatatttaaagttcagaaaaggagaaattcacatggctaaaggatttggtaaaggttttgttactggtgttgctggtacagttgctgctgtcgcaggtgcagtttatacattcaagaaaaaagtaatcgagccagaagaaaagaaagcagctttcatcgaagaaaaccgcaaaaaagcagcacgtcgccgtgtctcacactaatcattcaaaaagccccgggaaaccggagcttttttgtgtggttcaaagaagtttagattgaaatttcaccgttctttgatcattttcgttgcgatctccaagagttcgactcccatctgaaagtgctcgtctaacaaatcatagacggcatcttcggacaagacaccacaaggaagatcggctggaaactcagcctgattggacaagtccaaatcatcaaaataggcctgactactataataatcgcgcagttggatatagctttcttgatgctctcttagctgatccactgcttttttggtttcttccaaagttttggcatagtcattcaaataaccttccattctttggattcgttggattttgtcctgttcaattgccatgatttactccactttcaccacttctagatggggagcacctagaagcacgaggtatttttctacttgctctttgccataagaacgacgaagagcttctgcatagagatcgagctgatcccggtagcgttcgaccaattggctaggaaccttgtagtgatccgtcttataatcaaagagcaggatccggtcttctagcaccaagtaaccatccaagatcccccgcacgacgaaatcctcaccactggctggatcttccttcagcatagcaaagggagcttcacgccgaacacgtgaggcttctttttgaagcaaggtccccaaaggcgtctcatagaaagcgaggatggcctctagcttgatgcgggctttgaccgctggctctgcttggacttgctccaaggcttgatgcagcgtatccagcgtgatttcttcttcaagaggcacgcgctgcatgagttcatggacagcactaccgacttgggctcctgtcacggctttttcttgcccaaaagttggaagctcaaagtcaggcgtcacagtctttgcatccatgatctggacgccattggcatccatgactggctcgtagaatttcttgatttgacttggagtacggacacttggtaaatgaatagccggagcatagagctgattgagccgatcaacattttccaagatatccaaggcccgacgaatatcctctgactgacggatatccttgagctgatcgaagcgggaatccttctccttctctagtggctcaagctggtctggtgtcaggtcttcgtctgtcacaaaacgcgtgtcataggccagggtattcttggtaaacacatcttgaatggcaaagagccagtcctgataagaggtccattcttttcgcttctctggatctagcttgccattgcgactggttccccaatcggtatcacgcagtttgtcctcccggccttttccgaccagatagagcttgagctcggcccgtgtcatagcgacataaagaagacgcatctgctcagaaattgtggccaattttgtttcttccacattgcgttggtagcaaggcgtttcgatctgcaggcgaatggattctggagcagcaggattctctgtctcaaccggcaggttcgcaatgtatttaaagccaatccctttttgacgactgaggataatcggccccgattgatccttacggttaaaggccttgtccatattgagaataaagacatacttgaattccagccctttactcttatggacggtcatgagctggacggcatcttttggtgctgcaagagggacgctggccaaatcgtgttcattttcgattaccttgtcgatcatggcaatgaagcgcgacaaacccttaaagctggctttttcataatcattggcccgaagcgtcaaggcatagaggttggcctggcgctgggccccatttggaagggcgccgacatagtcatagtaatagcgatcctcataaattttccacagcaaatcatagagcgaagaggtcttagcagcagtccgccaagtagataaaacctggaggaagttctcgattttagctgagagcttggcatcgatcaaccgtgcctgctctgcagttttctcaagggctaactggaccttgtggtagaagggtagttgcttttgctctggaaaggtctgcaaagaaatccgtgccaattcatcttcatcaaagtcaaacataggtgatttcatgagagcaaccaaggcataatcgtgcaagggattgttaatggtccgcaaggtatccaacatgaccatcacttccagtgactcaagataatgcgcctgtccactatctgccacaatcgggatacgatactggtcaaaggcttccagaatcgcgtcatttcgagttcgagtcgcggtcaagagcgtgatctctttaaaaggcactttttccacccgatggaggcgtaaaatttctttgatgactaggagaatttctcccttggaaaccgtctcgagtccagaagcagcttcctcgtcttcggtcttttcttcctggtcttgggagccatcatagagcaaaaattctgcccgatgttgtggcaaggccatccgctgcttgtcacttcctgcaaccagataatgggtttgattgtagtcaatctcgcccacctcttcgtccatcaaatggcgaaagacatcattggtcgcgtccaacacctccacatgacttcggaaattttccttgagcagtatcaaacgcccttttgccccttcttcctggtagtccttaaatttatcattgaaaatctgtggatctgcctgacggaagcggtaaatcgattgcttgatatcccccaccatgaagcgattgtggccatttgacagcaagtccaacatccgctcttgggtgtggttggtatcctggtactcatcgaccatgacctcatgatagcgctcttgaaaggcttgtctcacctctgggaattgctctaaaatttgaatcgcaaaatgactgatatccccaaattcataagctttttcttggatttttcgctcaagataagcgcgagcaaagtctctgataaagtcccgaagcaaggagagcatggggccttcttcttggtggaaggtttgttgaaattccagctgatagagctgattttccaagtctctgaggcgattgatatgtatggttttatcctggttataagccgtaactagctctttcagctcttccttacgggctctgttggtcaaggctcccccatttgaagcccgactaatcgccacgacagcctttaggacagaggtcacttgctctttattggtgcgacctgtcaggcttccaatctgatcgagcacctcttctacagcttccaagtatttggctttgccaaatgcttggccttcattggacaaatgaaaggcaaaaaagctttctgcctcataaagggcctgctggatgctctccatcagatcgccttccacctggtcaaaatcggtctcctcatagccttttaggaaatgctcttccagccatttctccggatcactggtcgactgaagaaagttatagatctggtagatctgttctttaaacaaggttaaatttttgcgctgtcccgtgaaattcttgaccatctgcacaaaagcttcttggttttccccctggtaatagcggtcaaaaacagcttgaaaaacttcattttgtaagaggcgttgctcactggcgttttgtaaaatgcgaaactgaggcgccaacccaagcaaatagccatagcgcgttaggaccttttgggtaaaagagtccatggttccgatatcgctggtggcgacatctgctatttgacgggccaggtgttgcttgagctctggatcatcactcgcttgaagggcttttccaagttcactttccaaacgctccttgagctcccctgctgccttgaccgtaaaggtcgagataaagagctccttaatcgaaatgcctcgctggatctgatccagtatccgctgcaccatgacaaaggtctttcctgatccagcagaggccgacaccaagatattggtccccgaactatagatggcatcgatctgttctggtgtccgcttttgctctttattagaggctgcctcttgggcctgaagggccttgatttcttctcttgtcaaaaatgcttgtttgatcatttgttcaagacctccttcatcttctcgatccaagcggttttcaccttttcaccgcgtattcctttttggtctagtttggtcaagaaccgtgcctgaccgaggtgacgatccgcttcaaatcccgtgatggatttaaactgctccacaaatggtgcgatattgcgaccattttcactatagggattgatggcaaattgccccttgaggatcccttctgctgctgttttatagagataagcgttgtacaagaggagcaagtctagttcttccttactcagcatcatagccttgttcttatcataggcctcgcccagataaggcgcctgatctgccataaagagccccttgtactgttgacttttcatggtttgattgatggcatcctctactgtcttggtctttttcagatccactacaggatctcccatttccaaatacatggctccgaaaatcccctgctcctcttggtattccttcaaatcctgaatggcagaaagataggtcggcaattgagaattcagtccattaaagaacttgtcatagtggaactgcgtcagactggacttgtagtccacgactccgagggctccccgatccctcaattgatcaatgcgatccaccttaccccgtagctgcaggagacggccatcggacaaatgataagaggtgtgggtgcttccaccaaagagggtctcctcaccgatagtctcgatcccattttgctgggcgaggacacgccccgttgttttcgcggtatcaagaagcaagttgcgaacaaactcggtctctccattttctccatacaattgctggaagtctgcttcttggctggtttctcgaatcgcctcgtttaaccgccgatcaaacgcttggtcggagctatcttttaagactttttcaaagatccggtgcagaaaattcccatgactgcgagcgtctggccggatggtttcgtcctcttgtaagcccaagacatagcgcagataaaaggcatactggtgcttgtagtattcattcaaggcagaagcggataaggtcaaggctttgccctctggatagagcgcttgaagcgtatccgactgaagctgacggctctttaattccgttgaaatttgaggaatctgaatgccttcagcggctaatttcttgcgcaagacccgtaccgccacaccccaaaagctagcttcttctgcagacagctcactagtgatctcttcttgatagagttcgatcacgcgtgctaagagggcccggtaggtcccgatatcatcactcgaggcttgagcttgtttggtcgtccactcgatggcaatgggctccttggccaattctacaaggtaaggagagacactatcttccatttcattaaccaagctaggggccgatagaaccagttggttggtggccgcattgaggagcgaaactgccacaaagcgatttttcttgagattttcgctggtcaccacctggagctctgctccttcttgggtggcctcattcagctgctggcgctcttcttcactgagcagagaggtgttctgagcaatctttggaaaacgctcctgggtcagcccgatcgcgtagacataaggcgctgtcaagggttcaatcaagtcataggactgaaccgtcaccacatcgaccgtagcaggaaccgtccggtattgagacaattgcatccccgataagaggagggccaaaaagtcatctacggtcagctcttggtcctcaaagaccaggttcaactcctctaagacatgtagaaaggccttccagacctggtcatagcgctcctgctcctccaaggctagatccttgatcaaagcttgtagattctgagaaagttgagcctcttgcagaaactctgtaaaggcggttaagagatgggtcaccttttgtttgcgctgtgaaaagaaaggggctagaggttctacgacgcgttcccggaaagtattgagttcttccagatttaacttaccctgatgattgctagtaaaaggcttgtgaaattttgtagcaccctttacttccgcaaagcgaaggtattgctcaaaagcatcgacttcttcttgcgtcagatcactatacagacccgttttcaacagattgatgacgtcttctgtctggtaattgaactgcttgatccgccctagcgattcaatgacctgaatcaagggatgttggatcatagcttcacttcgtcccaagtaaaatgggatctgatactggtcaaaaatggtcttgagttgcaattgataagcttctacatcgcctaacaagacccgaatatctcgatagcgtgccccatcatgaagacgctgacgaatggatttggcgacaaattccaactcttccttttgcgtgttggtttgccagagttggacagctgtacgatcgtgctccttgagctcattttccacttgtgaaaaatcatagcgcgcttctagcatgcgggtaatgcgactaaaagagtcttcgatcgcttgcccacgatactgaggctgtacctcaaaagtctttgccagctgaagaagaaagtcaacactggcctggtaaagattgccctctctaaagcttgctcgataggctttttcactggcatagaccccgatgacaatctccactccttttcggtgaaggagaccaatcaaggcctcttcttccgcagaaaaacgcgtgaagccatcaacgacgatcgccacatcctttaattgctcctctaagtgccctgcttcgacctgattgaggaaaaaggcaatcttggactgggattcataccggtgctggaccagcatctcagagaccgcttcaaaaatcgccaagaggtcctctcttttttcagcttcctcgagcatctctaaatcggtaaaatccatctgggctgtctgcaattcatgatagagctggactagttgctggataaactgaggatccttacgcagagccccgtaaactttaagatcctgctccttcatctgggaaagagctttaaaaaatagcatgcctagaccgatatcatccaagggttgctcctcaaagacctggttcaggatgaaataacgagccatttgggcaaagcgcgtgacggtaatggcaaaagaagcctgaccttctatataggacaagaccttggcctctttttcaaaggaaagagagttgggtgcaatgtaaaatacacgcttgccctgttctactaatcctacggcttcttgtgtcaggacctgggtcaagggggtccgaacatccgtatagagtaatttcatccgatccgttctccttttggtattttcttgagagcttgttatctccttattatatcattttcacagaagggactaaagcaagaagccatgctcctcttggcccaattttaggagatttgtgctacaataaaagttgaagagacagaaaggataccacctatgaccagcatttatgatttttctttagaaaaccagaatggggaggagattcccctttctcactaccaaggtaaggtcctcatcgtggtcaatacagcaacaggctgtggcttgaccccgcaataccaaggactgcaagatctctacctgcgctaccaggaaaaggggctggaaatcctagacattccctgtaaccaattcatggggcaggcaccaggaactgcagaagaaatcaatagcttctgtagcctcaactaccagaccaccttcccacgattcgctaaagccaaggtcaatggtaaagaagccctacctctctatgattggctcaaaagccaagcagctgggccactgggcaaacgcatcgaatggaactttgcaaaatttgtcatcgaccgacaaggccaagtcgcccaacgcttctcctccaaaacagaaccagctgctatggaagacttgatccaagaattgcttgaaaaataagcaaaaaaaggaaagaatgatgtttgaataaacgacattctttcctttttcttattgtattcatctattcagtccaatcttcaagaaatttattcgattgaacttctaatttaaccaagaagagatcgttacttttcacttccctctttctcactactgtgtttttctttatacttatcggaatccttcgtaaagagtttctggggtaaatcaaccaaccaatcaaaaagacggtcgcctacaaattgaatagctagaagaattgcagttgccactataaagcataaaatgatgtaattatcaacatttgccatttttttagcctccctattttcataccactatcattgtctattcatcgtgagtgttttctgatatcttagttaataatgcatctataatagcaggtgagacttttctctcttttaaagaatacatccccttaggctcaaaatgcatttccatatttaatagttgtttcccatttagaaagatcatactactaaaggaactttgtaccgtagtatcatgctgatcatagataaaacttccgttatctatctttggatctatataaggaatataatagattgcagttctactagaagctgattttttcaccgctggaagttcgttttgttggtaaaaagatgaatttaaataagtatctaataattcttgagcttgtccagaattctggatatgaaattttacttcccctcgattatacgcacccaatatttcaatacctgtatggtcatatacataagctttgaaattcaagccaccaacttgtttgttatctttatcgaaaaatacatatgtaatagatacgcttttttcggaatcatcataatcccaaacaccttcatcatttagtttaacactagttacgccgtattgcgacatcacttctttcacatccttatcggacaatattttctcaagatcttctgctgttgtgaatctaaggttgtcttcttcactatcgctactagtttctgagctcatcgaatcgctagtactaggactactactctttgaaacaatcgtttttgaacaagcacctaagcaagccagtagtaaaaaaccaacacctatttttttcagttttttaaatcccattcgtttcccttttttatttatgcaaacttcctaaactctttattcaatagggattgaataaagcgtgtaacgacaataaatctacccatttataaataacaatcgtttatcaacataaaattacgcttttattctaccatcttgtcttatctttgaaaagcttttttggagaaatattctgcaattatagaccttctgacacttatatatgactgagatagttatttttttctatagccaatttgaaagcccaattcacgcttgctacagacttgatccaagaattgcttgaggaataaggaaaaagcctgagccaatgctcaagctttttttctttaatcaatttcaagtccaccggtgtagaggcggtaataggtgccacgttctgccatcaaggaagcatgattgcctcgctcgatgatgcgtccgtggtccattaccataatcacatcggaattgacaatcgtcgatagacggtgggcgataacaaagactgtccgaccttccatcaagcggtccatcccttcttgcaccatcttctctgtccgcgagtcgatcgaagacgtcgcttcgtccagaatcaagacaggcgcattggcaagggctgcacgggcaatggcgatcaattgtcgttgaccatttgataggccagccccatcatccgtcaagactgtctcatagccctgatccaagtgcttaacaaaggaatccacattggcaatccgagctgcttcaaggatttcttcccgtgttgcatcagcacggccataagcgatgttttctgcaatcgtaccagtgaataagtgggtatcttgaagaacgattccaagggaacgacgcagagaatctttctcaatcaatttaatatcgatcccatcataagtgatcattcctgactggatgtcatagaagcggttgatcaagttggtgatagttgtctttcctgcaccagtcgctccgacaaaggccactttttgacccttatccgcgtacaagttgatgccatgaaggatttgtttcttcccatcataagagaaatcaacatcatcaaagaccacatttccgaccatcttgacaagctcgtaatccccatttggacgtgggtgtttccaagcccatttgttggttttctgatcagtttcgaccatttctccatcgaccagttcataattgaccaacgtcacttttccttggtcgacttcttcttcttcgtccaaaagatcaaagacacgatctccaccagccaaggccatgaggacaaagttcaattgttgagagacctgagcaatgggacctgtgaaggaacggttcaattgcaagaaggccatgagaccaccaatggttaaaccaccgatgccatttaaggcaaaaagtccaccgatcaaagctgtcaggacaaaggaaacatttcccaagttcccaagaattggcatgaggacattggcgtagcgattggcttggtaagaggattcaaagagttggtcattgatacggtcaaaatcctcaatgctttcagtttcatgcacaaaggccttgactaccttttgaccagacatcatttcttcaataaagccattttcaatccccaagttcttttgttgggccccaaagtaacgacctgacttgctagagacattcttgataaccatcgtcatgataaagaccatgacgaggacaatcaagaacagcagcggactaacggtcagcatggtaatcgttaccccaaggatggtaatcgctgaggataagagttgaggaatggattgttcaatcgcttggcgaagggcatcaatatcgttggtatagatggacatgatatccccgtgttggtgggtatcaaagtaacgaactggcagtttttgcatacgggcaaacaactgatttcgaagacttctaagcgagtcttgagagaccgtcgccataatcaaggtaaagccatagttggcaagtaccccgatcaaacagatcaaaccaacccgtgtcaagaaggacaagagcggtccaaaatcatggctgttggacgaaagcataggctccacatagacgtcgaccaaagactgaatcgaagctgtcacattgaccgtcgcaagagacgatagaatgattaagataaaggaaacaatcaaggataccttgtagtttttccaaaggaagtcgagcaggcgaaggatagagcctagatttgcttttttcttagttttcatctgcttctcctttcccttgtgtttgcatttcatatacttcttggtagatagcattggtcgcaagcaattcctcgtgacgaccgatggcatcaatctgaccatcattcatcacaatgatgcgatctgcatcttgaatagaggaaatccgttgaccaatgataattttggtagtctctttcaagctggttgccaatccttgacggatcaaactatctgtcttggtatcgaccgccgaagtcgaatcatccaagatcaagatcttaggattcatgagaagagcacgcgcgatacagagacgctggcgttggccaccagagacgttggatcccccgcgctcaatcatggtgtcataaccctctttgaaatcttgaataaattcatcggcttgggcaatcttacaagctgcgatgatctcttcatccgtcgcatctttatttccccagcgcatattttctttaatcgtaccagagaaaaggacattggtctgaagaaccatggccacttgcttacgaagggaatcaagatcgtattctttgacatcgtggcctgctactgtcacccgaccagactcgacatcataaagacgaggaatcaactgaaccaagcttgatttccctgatcctgttcctcccaagatcccaataacttcccctgaacgaatggaaagattaatcccttgtaagacatgggtcttgtcgccattttcatcagtataggcaaaagtcacatcctcaaagttgatggatccatcagcgacttctttgatcccattttctggagagtcaatcgtcgttttggtcgttaagacttcattgatccgctcgacagaggccatggaaatcgacaacatgacaaagatcatcataaacatcatgagcgacatgagaatggtcatggtgtagctaaacatagaagtcaaattcccagtggagagttgaccaccaacgatcagatgagccccgatccaagaaatcaaaaggaaagaagcatacatggaaagcatcatagctgggctactcaagacaacgacacggatagccttcataaacatgttataaatcaaacgcgaagccttcttgaatttaaccgtttcatctgcttccttaacgtaggacttcaccacccgcatattggtgatgttttcttgaatgctgttgttgagattgtcataagcttcaaatacttctgtgaagagcggatacacaatcttcatgatgatgcttaagacagctgccaaaaagatggtcacatagacaaagatcatggccatttccgcattgatcataaaacaagccacaatagcaaagatcaaattaagaggtgcccgtacacagatccggatgaccatttgataggcattttgcacattggtcacatccgtcatcatccgagtgactaacccacctgatgagaactgatcaatattctcaaatgagaaggtttgaacctttttgaaaatagcccgacgaaggtttttggcaaaaccagccgatgcataggcgccataacgggcagactgcatcccacaaaagagggagagaaaggcacagaccagcatgagcccaccgtaaaacaaaatattgttcatgtttctttgttgaacaccttggtccaaaagactcgccatgacaaagggaatcgaaatctcaaacatgacttcaaagaccatgaacaaggaagccaaaaacgagggcttcttgaattctttgatctcggaaattaaggatcgaatcattattacctccaatgttattcatactttttcctgcggtagaagcaaagcttctttccatcgaaaataggtcaaaacacacaaaattccctgagggaaagaccctagggattacgcgttttttatagtcttcattgtaacctaaattacaaaaaaatgcaagatttttagacagcatccgtttttctgttgatctagtacaaaagaggctgggacaaaagtcctagcctctcaattgtttttggattgtcgagcaagacgcagtggctgagtgggctctactacgctgattttatcagcttttacagccctactcaactgtgctgaggtgggacgacgaaatcgaattctaacgaattaccgatttctgtcccactctctctatgcgtatcctgtcttattcttccttagacgtagcgacgagattcaagaagcgatcaaagtaggacttattttctttcaaatcctttttcagtctttgcgcctctgtcaattcatccgtaatcaagccatcaatgggttgttgcaaatacttggtcaacttttgcttgtcattgatggtccagacatagagctcttttttcatctcatgggcctgggttaccaaattcttttgataagaaaagtcttcaatggcaaaaaagtcaactgagaccttttcaaagcgaccgaattgaataggaatgacatagccggtcttgatctcaggggcttttttctcgactttttccatgaccgacagatccaaagacatagccggatagtctttttcgacccctaagtccctcatcttctgcacaaagagatccacataattagcaggctctccaccatgagacttaagctcgaccaaaagcttcatcttcaattctttggcccgtttgacatattcctcaaatgaagggatttgactcgtgtgaccatcctgttgaatcttgaggccttgcacctcagctagggtcatgtctttcacatccttgtccaccccagcaaggcgcttgagattgtagtcatgcatgacgacaaattgatggtccttagtgagaagaatgtccatctctgcataagctgccttttccttggcagctgcttctaaggcttccagagaattttctacccctttagagacatcgccacgatgggcgatgagcttgatctggtcattcacctttagggttgccagttcataggctgatatacccgattggaccatgagaaagaccactgtcagggcaaagagccccttcatctttcgactgcctttcgagcgcatgacagatcggctcggtacttcccatgcagaatccaagataatgccgagcgaccccacctttgtcaagactgtaaaaataaataggaaggtccgaatcaagaccaaaaagatggtcaccacccagaaatactggccttctttatcgatcacggtcaaggtaaagaccaaacccaagatcaataaaattcctagaaaggttaagagaaactcaaaggacagaattctccataagagacgaaaacctcctcttttggtcatagtccagctttttttcaaggcacgaccaaatggcaactcctctaccacgaggttgggaaccgtatagatgaggcgaagattgagatagataaaggtcagctgcaccacaaagagcccgatggagccaatcgtggtcttttcaaactcccccgtgataaaggttggaatataaagcccatctgtcaatgtcgatcctatcaagacacctgcaacaggcaaggtcaaaaggagatagagcagaaaataaagcagatttcttcccgctaggtccttcaagcgaccaaatgattgccgcaagacctttttaaaggacaagtgtcggtcggttcgcgataggtaaatgaccgaaatcagggtccgcatctccagcataaacaagaaagcaaagaccatgataaagaccaaaagagccagcaagctcaagggatggctcataacagagacaaggttgttcttatcgatattagcctgacccgcaagcaagactgccagatgaaagacccagctcaaggccgcagccccaatgccaaccacaaattgtagcaaaatcccaatcgcgataaaggaccatttattgcgccagatcaagtaaaaggcccccttcaggtcctgccaataactccgtttcatgctgtctctctttcctttcttttattcccctagaatagcggaaaaacctccccttgtcaatgattccacaagaaaaaggctgggaaaaccaacctttcttatttattcagctaagagcacttctttaatggtttgtttttggagttttctgttggatagataaaagaggctttcataaaccacagcaaaaccgagcaaggtccagaagcacacattcccatcaaagtgatgctcaattttaccaggaaccgtatctttgatcacaccgatcaaaatttccatgatgccatattggtaaaccgtcccaagaacaaatcctaaataagcccaaaaacgatagggagcgagaatatgaccttggcattcacgatcggtgtagccaaaagccttcataagagacaaggtttcgcgactttcagagaccacaatccccaatgacaaaaagagtatcgagaaagaaaggatcaagccaatcatgatcatcatggtttggatgatgtcatctgtgtaatccctgaggccaaaggacaattgaaccatggccgcaaaacacatagagccaaagactacaaaaaacaagatcgattttctcccccaaatcagtgacgaagacagctcttttaagaagtctttctctttcttaggagccttctttctcctttggaccttgattggtgttggagattttttcaataagcgaagcgccggcgtttgtagttgtcttctagcatagccaatcgcgagaaccataaaaaatgccgttggcaggatcaccaaagcaagcaagagctgccagtgaaagtgaatggtaatttctggcaaaatccccttctcattacggaagtcgtaaaaatgtcccatcataagaaaagaagcaaaatagccaagaagggctccagctccaaaactgaggccaaaggcccaaaaccgtttcgccaactggccattgctgtagcccaaagcctttaaaatccctaattgttccttgtggtcatcgacaaattgtttgatataaaaacacatgagaaggaccgacgtcaaggacaagacaactccactgaccatggccaccatccaggaaagcgaaacctgggcatcatagtaggtctgaatcatgggattggttttcgaaatctccaactgctcgatatccagataaaaattcaagaagagattggccacaaagaccgcacaagctccaatgatactgacgacaactaattttcgaatatcttttactgaaaacatggcttaccatccaatctcataggcagtctgaggctgatcattggtcacaacttcggtaatcttaccactattgacacgaatgatggttctggccatatctgcaatattttggttgtgcgtcaccatgatgagggtaaagcccagcttttccttcagtttccagatatagtccagaatctttcgtcctgtttcttcatccagggctcccgtcggctcatctaagaaaagaatctctggctttttggccaaggctcgggcaatggagactctctgctgttccccacccgacaattcactcggatatttgtccagcttatctccaagtcccaaatcctcgatgatctgcaaaaaatcatgattgtctgccagatcagctcccatctttacattctgtctgaccgtcagattcggcaatagataatactgctggaaaataaaggcaatcttctcacgtctaaagtccgtcaattgagcatccgtgagttgtgataaatcttgtccttgaatgagaatatgcccttcgtctaccttttctaagcctgataacacatttaagagagttgatttccccgatccagaagggccaaggataaccacatcatcctggtcttgaatctgcaaatcaatcccctttaaaaccttggtttggccgtaacttttgtgcacattttctagttgaatcatttctttcctaccatttctttgatgagagattgacaaacctctgtcagtaatccaatcacttcttccatgccgaactgataaataccagaagcaaccatagaggccatcccgtgtgagtagataaatagatgctggtacaagcgactagcctcctctacagtcaaaggatagtctgcaacgatcgaatccagaaccaattggtaactatgatccttcatgggaagaaaatcttgaaagcgacgaatcggctctttgctaggattttggaaaagcaattgaaagagttggggttcttttgaggcgaaaaggatataagcaaccccgacggatcgaaaaggcttctcatcttccaaggccttacgaatatactccaccacgaccatttccgcagcaccaataacctctgcttgtaactcagccatattagcaaattgcccaaaaatgactctcggtgtggctcctagtttctccgctaatgctcgagccgtcaaactagccattccctcttctctcaccaattgtaaagctgtcccaatgatagcctctttactaaatttaaccttaggtggcataagactcctttcgcgcaacatctgttgcgcaacgcttgttgcataaaagaataccataaaaaagaaagacttgtcaagaaaaatctgaaaatcacaaaacaaaaaaccagaccaccgataagagtggaatctggtttactaacaagattctaaggcaaatcatttcctgcagccaagtagatttggtaccattccttgcgagttagggtgactgttgctgctttccctgcttcaaggacatgctggggcttggtcgttccaatgacggcctgcatcttaccaggatagcggaggacccaggcaagggcgatagctgtcggtgtgacctggtattttttcgctaagtcagtaaggacgtgattgagggctgcaaactcttccttgccgacaaaattccccttgaaataaccatgctggaggacagaccatccctgaatcaccgtatcagttaagcgacaatactcaaagacactgccatctcgcacggctgcttttggcccttccatgttgacatgaaaaccagcttcaaagctcggtgtaaaggcggcactcaactgcaactggttgaccttgagaggttgtttgacagccgtcttaagcaattccatcatcatgggattttgattggacaccccaaaatgacgaaccttgcccgcttgctccaactgatcaaaagctgccgccacttcttcaggctccatgagggcatccggtcgatgaaggaggaggctatccaagcgctcgatctggagacgctcgaggatgccatcgacagagtccaaaatatagtccttagaaaagtcaaaataagtaaagccgtctttgcgaatgccacacttggactgaatccacatctggtcccgtagatccggacgacgcttgagaaccttacccagaaggacctcacactggccatcgccatagatatccgctaagtcaaaagtgttgatcccaatcgacaaagctgcctctaccaaggcctccacctcgtcttcactcatctgactgatccgcatcatcccaaggacaatcgtggacagacgctcattttcagcaaactcaatatagttcatgtccgcctccttttctgtaattctattgtagtgaaaaggcttgcaaaagtcaatttgaaatcaaaaagcccccagctgtttctgaggacttgtttgattagcgatagctaagagcacgtttgatggtcttccatggtccgaggtcatcggtctgaaggatcaggctcgcatagatacgggcaatgagaactgttcccacgatggtaaagagaaccgcaattcctaaagaaccccaagcttcaagaccagtcgcatagccattgatggtacggaaaggcataaagaaagttgagaagaaaggaatatatgaaccaatcttcaataagaagacgtcaccggcacttcccaaggtggttaccccaaggaagctaaagatgactaacatcatcagtggcgaaatcgcttttcctgaatcttcaggtcgtgcaactgtagagcctaagaaggcagagagcaccacatacataaagatcccaaggataatgaagaagacggtattaagcgagatcgcttctgctaggtgttgggtaattggagagtttggagcgagaatgtccttgacaacagggatatctgctctaaagatccaaacagctactagcccaactacatagacaaaaatatgggtaaaaatcactccgaagagtccgagcatgcgtgcgaagaaatagtcggttgctttgatactagagaagaccacttccatgatcttggttcctttttcactggccacttcttgggctgtgatactagagtagaagatcaaaatcatataaagcaacattcccagaccacctgcaaccatggtttgcaccattttcaagccttcttttttctcgtcaattttttctttcagagaaacctgttgagacaaggctgtcagttgctctttgcttagattagcacgggccatattgatcccctgttggacttggcttaatttcgcagcgacaagggttttcaaatctgttttcatggcttggtcgcccacataagtcgcttctagctggccatctttttcatcgaccgttaggtaagcagctgctttctcatccttgatagcttttttagctgcagcttcatccttgtagtccaaggtcaagccatcagttcctttgagactttctttgacagctggaacttctgtcaccaaggccacctggtttttggcatctgtagaagaacctgtcagataaccgattccaatgctcaatcctaaaaagaggaagggaccgaagaccatgaagaggaaactccatgatttcacttgtctgatataggtttctttcattacgacaaacatctgtttcatacttctactcctgattcaagtttaaagatctcatcaatagttggggcttggtggtcaaaggttgctaggtagcgacccttggtcaatcggtcaaataattctggaccagctgacgcatcatccaagatcaacttccaagtaccttgcttggtcatagtcaccttggtcacgtgtggcagagcttctagctcttctttgctaaagtcgttagaaacaaagagacgagtcttgccatagctattacggacctcttggactggccctgaaaggacaaccgaaccatcacggatcattaggatatcatcacacaactcttcgacattggtcatgacgtggtcagaaaagataatggttgccccacgctctttttcttcaaaaatgacctgcttgagcacttctgtattgaccggatccaagccgctaaagggttcatctaaaatgatcaatttaggctcatggatcaaggtgatgatcaattgaaccttctgttggttcccttttgagagactcttgattttatcggtcaattttccttttacttggagtttttccatccaggtcggtaatttttccttgacctcagcagtgctcattccttttaaggcagccaaatagcggacctgctcaaaaatcgtgagttttggcatgagactgcgctcttctggcaaatagccaatttccttgtaagtctcttgggtgatcgctttgccacctaggcgaatctcgccgctgtagtccaaaaagcgcaagatactgtggaaaatagttgttttcccggcaccatttttcccaactaagccaaggatatgcccttgttgagctgtcagatctactccgaagagaacctgcttattcccaaagcttttttctaaatttttgatttctaacatagaaaactcctctactctttataataacgtttggtaatcttgtactgagagaccaagatatagacataaatcagtgataccactactaatgctaacaagatatctgtatggaaagcaatgccaattaagaatatcgcaattaaggaaatcggtaagacataattgcttaacttgacgaccacttcgaaattttcctcgtagctaatctgtttttctgcttcatccatcatactcatcatgaattcacgcacttccttggcattggcgttgcgaggaatcggttttccataaagcatatggaaggtcttgcgaaagaagatatctgataagaaaaataggacaatcaagacaagaaaaagatagagcatggtaaaagttccaaagaaaaaagctaagagccctgtggaaggtctatccatatacacccattgactataaaagatgatgactaaaaagtatggcaagatcatgactcctttaaaaatggtcgctaacccaaacagtttttccttctggatgtcatagtgataggcttcatcatcgtcttctatttggagcattttttgatggacttttctcgcgcttattagtaaggctatcgtgaccataaacacgataagaaataaaagtattgagcccaaaagtagtacttctatactaaagaaggattggatttcaaggggtttttcggatccgaacatgcctgtcaaaaaaccaatgactcctccaatcaagccggaaactgtgatgattccgacatttctccaaaaccgataacgagcagatcgttcttgttgttgctttttcatattattcctctccctctactagactaaagacattctccaccggctccttgaaaatttgggcgatggtgattgcaatgataaccgagggggtgtattccccccgctccaagagactgatggactggcgcgagacccctgctagcttggctagctcggattggttgagaccatcacgcgccctcagctctttcagccgattttttaagatcatggctttcgcccccttatagttgaatatcttgaatatcttcgatacggactaatttggtttctctttgttgttcattcatctcacgactcaatttgacccaatcttcatcaaaatcaacaatttcccacttagttccaaatccatttactgtcacctcaaccgtttggccttttaattcttctaaaagtctagacatgtcttgatttcctttcacttgcttttctaatcgtctgatgcgtctattcaatccttttatcttcttttctgagcttgcataaatgataatcagaaaagggataaagagaatccacatagctcccataagaaaacctccccttctttcaactaaaatcattgtaacacttctttttctttttgacaagcatatttgtcaaaaaaataaaaatatttgtcaaaaataaaaatatgattgataagatcatttgaggtaagaaataaaaggaccgcatttgcgcaccttttagcattcctaagaactctaatctggaatcattctcatcttcattaaaactgtcagaattctttcactttatggtataatggctataacataattataaaagaaggtcaagaaatatgctcatactcgatgcagcggtgaaaacaccttatcgcatccttggaattgatttaccgaaagacagtttactccatctgtcccatctgggtgtaacacccggcgagaccttagaaatcgtaactaagaccaaagacagtgccatcctcatcattaaggggagtcggctggcatttgatgcttctattttggaaaagatcgagattgctccccttgaacaggagcatacttgttttccactttctgagttagccgttggtgaatctgctatcgtagtggatatttttgcaatcaacgaagccaagcgtcgtctcatggacatgggaatcaccaaacgaaccaaactctatctgagaaaagttgcacctttaggggatccacttgagatcaccctgcgtggctatgagttaacccttcgaaaatcagaagctcagatgattagtgtgattcgactagaggaaggagagaagcatgactgaaatcgccttgatcggaaaccccaatagcgggaaaactagcttatttaaccttattacaggaaccaaccagcgagttgggaactggcctggtgttacggttgaaagaaaaagtgggatatccaaaaaggacaaaagcattcaaattcaggatttgcctgggatctattccatgtccccctatagccctgaagaaaaagtggcacgggattatctcctaagccaagaagcagatagtatcctcaacgtagtggatgcgaccaatctggaacgaaatctctatctgacgacccaattgattgaaacaggtatccctgttaccgtcgcactcaatatgagcgatgtcttagaggcccagggacgctttattaatactgaaaaattatcttatcagttaggagttcctgtcattgcgaccagcgctatcaagcaaactggtgtagaaaaagccattaaaaaggcttctctcacaagaaaagatacggtgacagatctagcctttccccgctatgatgaccgattggaagcagctatttcgcaaatccttcaagtgctgggcaataccgtcccagagagagctgctcgcttttatgccatcaagctctttgaaggggatgctcttgtcacagaagagttaaacctctcttctttccaacaaagtgaaatagcagatatcgtccagattacggaggaaatctttactgaagacgcggaatctatcgtcatcaatgaacgctatgcctttatcgaaaaagtctgccgactcgcccaaggacaagatgctaccttcaaattcagcctttcagataagattgaccagatcgtcaccaatcggattctagccctgccgatttttgcggtggtcatgtatttggtctattacctctccatccaaactgtcggaaagatgtggaccgactgggccaacgatgtcctctttggcaaatatgtccctgacgccgtgaccaattttctccagtatctacacgtagaggattggcttcaatccttgatcatcgacggggttgttgccgggatcggaactgttctcggatttctgccacaaattttcgtcctctttatctgtctcggcatcttagaggatatcggctacatgagtcggatcgcctttgtcatggatcggattttcagacgatttggtctctctggtaagtcctttattcccatgctgatctctacgggctgtggggttccagctattatgtctagtcggaccatcgaaaatgaacgagaccgtaaaatcactattatgacggccaccttcatgccttgctctgccaagttagaaatcatcgccctgattgcaggtgcctttttccctgacaatccctgggtcgcacccagcacctatttccttggaatgacgaccatcatcctatccggaattgccctcaagaagacccgtctattaggtggtctagctagtccctttatcatggaactaccggcctaccactggccaaaagccttatctgttttccgctatgcttttgggaaggctatgagttttgtgaagcgggctggaacgatcatctttagcttgaccatcctgatttggttcctctcttcctataatttcagcctccaagctgtccatacggatcacagtattttagccagccttgggaaatccattgcttggatctttgaaccactcggatttgggaactggaaggcaaccgttgctgcggtgacaggacttgcagccaaagaaaccgtggttgctactttcggcattctctacaacgatagttctactgccggtttatctgctgccttaagagttgattatacttccttagcagcatactctttcctcacctttaacctgctctgtgctccttgtttcgcagcaatgggagcgatcaagcgcgagatgggggatctaaaatggaccatgggtgcgatcggttttcaaacagggctagcctatgtcgtgagcctggtcctctaccagcttggcctcgtcttccttctaggaaagcccatcaccatctggacgggactagcagttcttcttcttgtaggcatgctctactttatcctgcgcaaaccccaccatcaaaaagagacagttattacgctcgacaccctcgcaaatgctcatctataggaggttttcatgtcaaccattatcattgccatcattttatttgggctcgcctttctaggatttcgccattatctcaaggggaaaggatcctgcggagactgcgagtgttcctgccccatcaaagacgaaatgcaccaatcgcatcgacatcagtaagttttatataagaaagtccattgactctattgggtcaatgggcttttttgaaaagcatgaaaaaaaacgggagcgggaaagaactccgtaaaataaaaaagttcgttttcccgcccccgcacagttgattaggtcatctttggagcttaaaagcgaacaaagatgccaatcaaccactgcgtcttgcagttattcctatcaaatatcaaaggctggacatttttgcccaaccttattttgatctacatattagcgcacttctgcattgactttttcttcaagtgatgcttggattttttccatgtagcgagcgacttcttcatcggtcaagctatcttctggattttggaaggtcaaactgtaggccatagacttcatgccaagtcctagtttttcacctgagaagacgtcaaagagtttgatatctgttaagcgtttcacgccagcagcttgaatcgcatcaaccacttcttggtgggtcacttctgctttgaggagaagggcgatatcacggctgactgctgggaatttagtgatttccacaaaggctgcggctggttgaagagctgcttcaatagcagataagttcaattctgccacataggtttctgggatatcataagccttagctgttacagggtggacttgccccaagaccccaatcacctggtcaccaagtgagattagggctgtacgacctgggtggagactcttgatttcagatgttgctgtataagtcacatcaagacccaagcgagcaaagagggcttccaaaattcccttagcatagaagaagtcaactggaacagctgcagtttggaagtctttttcagcgactaagccagttaaagcaaaggcaaagctgttgatttcgtttggcaattcttcttttggattgcctgtctgttcaaagacttttccgatctcgtagatggccaaatctttgttcttgcgagcgacgttgtaagctacggtatctaagatccctgagatcatattttgacggaggactgaacgatccacagtcattggccacatgagctctgttaaattacttggagcagtcgcaaattcaactgctttttcaggagttgtcaaggcgtaagtgatgatttcagtcaagcctgctccttctgcaatggtccgaacttggcgacgcaatttttgagtcgctgtcaattcacctgcggtcccgtcatcttttggaagggttgctggtaatttgtcataaccataaatccgagcaatttcttcaaagaggtccgcttcaatggtgatatcccaacggcgacgagggacgcttactgtgaagctgtcagcatttccagaaaggccaaagccaagacgacggaagacatcttcgacatccgcgtaggaaagctctgtcccaaggacacggttgacgtctgcaagggtagaagaaacttccacatctgaagtatcaagctggcctgctgaaacgattcccttacgaacagttgcacctgcaagctctgcaatcatgcttgctgccgcatcaagggcttcattgacagtcgccacattgatccctttttcaaagcgagaagatgattcagaacgaaggttgaggcgaccgctggtcttacggatcgatttgccattgaagacagccgcttcaaggacaacacgagtagagtcttcagagatttctgtagcctctccacccataacacctgcaagggctactggtttatccgcaaccgtaatcacgaggtcacttgtttccaactcacgttcttccccatccaaggttaccaatttttcaccagcacgcgcttcacgcacacggatatcgtttccttcgaaggtatctaagtcaaaggcatgcatcggctgaccaaagtaaagcaagatatagttggtcacgtcgaccacattgttgatcggacgaatgccttcattcatgaggaggttttgcaaccattgtggacttggggcgatggttacattgtccaagatacgagctacataataaggagccttgtctgtgtcaatgctgacagaaagagcatctgctgcagcttggtctgtttcagtcaaagcaaagtctttgaaattgactgccttgtcatagatcgctgctacttcgtgcgctaccccacgcatagaaagagcatctgcacggtttggagtgatggaaagttcaataatttcatcatccaagtcgaggtaagagaagacttcttctcctggaacagcatcttctggcaagatttggatgccatctgcaaattctttcggtacaacagagtcagaaatccctaattcaccaagggaacagatcatcccaagggattccaaaccacggattttcccttttttaatcttgtagttgtccgcaatgcgagcacctggaagagccaccatgaccttgatgcctgcacgcacatttggtgctccacagacgatttgacgagcttcttcttcacccacattgacttggcagacatgaagatgagtttctggcacatcttcgcaagacaagacttctccaacgacaatttttgagagaccagcagcaggtgatgccacaccttctacctcgatccctgtagttgacattttttcagccaactcttctgatggcacatccacgtccaccaattgttttaaccatttatatgatactaacataattctgatcgtaagatcccactaggtgagaccttttcaattcctttctctcaatttggacccacaattaagcttgcggattctccttcaaatgtttgcgaagcaaccagtctgtatccacggtttcccctgtgataaagtggtgctcgctaaaacgttcaaatccgaattgtttgtaaaagttttgggccttaaaatttcgttcccagacacctagccaggcccagtcaaatccacgtttttgagcctcatttaaggcaaagctaaacatttccttgccatagcccttgccatgatgttcttttttgacatagatccgctggatttcaaaagcattgtccatctctactggctctgtttgtgccttaccccagttaaacttgagaaaaccacaaatttcctgattgtgatcaaggacaaaataggtctctgattccgggtttgctagatccttttggatttgctctagcgataaaaccgtctggtagtaatcttccatatcggcatcagagatgtagggaccaaaggtatccccataggtttccacctctaattcccttaaaatttgaaattcattcggcttaacttttactaacatgatgatttaaattgttctgaaaaacggatatccccttgatagaagccacgaatatcattgattccgtaacgaagcatagccacgcgctcttgaccaagtccaaaggcaaatcctgaataaactgttgggtcaataccactcatctcaaggacgcgtgggtgaaccataccggctcccatgatttcaatccaaccagttttcttacatacgttacatccagctccaccacatttgaagcaagaaacgtccacctctaccgatggctcggtaaatgggaagtaagaaggacgaagacggatttgacgttctgcaccaaacatcttttgcacgatcaattgaagcgttccttgaaggtctgccattgagatgttcttcccaacgaccaagccttcgatctgatggaattggtggctgtgggtcgcatcatctgtatcccgacggaaaacacgccctggagagatcatcttcaatggtcccttgctaaagtcatgcgcatccatcgcccgcgcctgtactggtgaggtatgggtccgaagcaagatttcttctgtgatatagaaggtatcctgcatatcccgcgctgggtgatctttaggcagattcatgcgttcaaagttgtagtagtcttgctccacttcaaagccgtccacgacttggtagcccatcccaataaagatatcttcgatttcttcactggtttgggtcaagatatgacggtaaccactagcaaccggacgaccaggaagcgtcacatcgatgctttcactagctagtttcgcttggactttcttttcttccaagagtttggttgtttcttcaaaggcagccgtcaagacatcgcgggcttcattgacgtgtttcccgataaccggacgcatctcagcagagacatctttcatccctttgaggatctcggtcagagatccttttttcccaaggacagagacccgtagttcttgcaattctttttcattttcagcagaaatctgcttcaaagctgccagcgtttcttcacgaagcgcttttaattgttcttcaatcgttgacatatttcctccatcatggtccctctacagacatagaaaaaaccacgcgccaacacccacattcggagcgttgacacgcggtaccatccgttttttatccgtaaaccagaccttaatttctaaatcctttacgcaagtgaattcactcagctttcatgcaaagagctttcagtcacggctcttctccctgtcgcacttcccttgagatactagtcttgcagatttctattcgattactacatagtttatcagatttttagttaaaaaacaagttagatgagactaattcactagaaaaaggaacaagagacagtgcattatctatttgccttgtctgtttcatctgcttgccttttcaatagaagagttgctgcttgattaaaaccttcacaccagttataccattttgcttcatactcatcttgaggtaagatacgatgttttaaatccaaaacagtggttatctttctttcctcgcaagctttcgcatagagagcatacaattcatcgccaccatctctatcaaactcagcagtaatcgtatcccgacctgccaataaagcctgataagccctatgatgcccgtctgtaatcaagaagcgatttccaaatgcaagaacactaattggatccacattgatgatttctgccgactgatccagcatctggatagcttgtaacttcttttctgataaatatagttgggtcggatgaagatctgttatattgacttccacttctttctcctctatcatgagtaacaaagctggtcgtgagtactggtaaacatttttaaaggtcacgatttaaagacctaccaatgctaaattcccctgctattcttattattcgtttcctttttatttaatgacttgtccagcatctttcaagacagattctggaatagtaatacccaattcatctgctacttttttattgatcacagattttccttggctaaagatttcaactggtgtatccgcagatttttgacctttcaagatcttcgcagccattttaccagttgctactccaagatcatgttggtcgacaacgactgaaccaagaccaccagcttctaccatagctgtcgcacttgggaagattggttttttagctgttttgttggcttcgacaactgttgagaaggctgaagcgatggtattgtcgattggaacccagatggcatcgacttttcctgacattacagacacagtggaagcaatttcgtttgtagaaggaacagaataaggaacgaccttgtagcctgctttttcagccaattttgtaaattcttctacttgagattttgagttatcttcactggttgagtacaggatcccaattgttttcacgttcggagtcaactctttgatcaatttcaactgttgctcagttggattgtggtcagataccccagtgatattgccacctggttttttcaaatctttgaccaagtttgcgccgaccggatcagtgacagctcccataacgattggtttgtctttggttgcactggccaatccttgagcagatggagttgcaatcccaatcaagacttggttatccttgtctaccaattgtttactcatagttgcaactttgttttggtcgccttctgcattgaggaaatcaatgtccactttgtccttgtcataaccttcttcagctaaaccatcttgaatccctttgtagatcaaatcaagcgaagggtgactgaccaactgcaagaccccaactttagccttttcattgctgcttgctgccttgttgtctttgcctgctgtagctgaatagatcgctgtcccaatgactgctgctgcaatcaaaccaataattcccattaaccgtttatttttcatttttaatacctcttctattttttcattttcttctttttttctatcatctaaagactgcgacgccatcgtttcttcatatcttttctcccttctcatctaaaacaaaaaacacgcccacacatagcaaaagctatgtgaggacgtgtcatcgcggtgccacctcacttatgggaaaaggatagtctcccccatatctctgtcttgtctagcaacaagttgcacgataaggtgtgccaaccgaatttttattgtttcaaattcatctcatcattagtccaatttcataaactgccgctacctactctcagcaaccgtaggctctcttgaaactttcatttactacttttctaatttcttacattttaaagttttctttcaaaaatgtcaatactttttctgcatttttttgaaaacgttcgcattttctattgaacagcccctagcttctttctgggatttcctctctaattttgatataatttactagaataaacgctagaatgatgaggaatcccatgtcttttgatggattttttttacaccatatggtgcaagaattgaaggccgaactcttgagtggtcgcattcaaaaaattaaccaacccttcgagcaagaattggtgcttcaaatccgaggcaatcgaaaaaaccaaaaactcttgctctctgcccattctgtcttcggacggatccaacggacccagaccaactttgaaaatcctgcctttcccaatacctttattatggttatgcgcaaatatctacaaggcgctgtcattgaagggattgagcaaatggagaacgatcggattctcgaaatccgtgtctccaataaaaacgaaattggagatgccatttctgtcagcctcatgatcgaaatcatgggcaagcacagtaatattattctcctagaccgcaccagcaataaaatcatcgaagccatcaaacatgtcggcttctcacaaaatagctaccggaccattctccctggatcaacctatgtagctcctccgaaaatcgacgcggttaatccttttacaattggagatgaagccctttttgcccttcttcacaaggaagagttaagtccaaagaaccttcaaaaatgtttccaaggtttggggcgagatacagctcaagaattagccaagcgacttgagacggatgaaaaattaaaaaccttccgtgcctttttcgaggccccctctgatcctcacctaacaaccaaatccttctcggctatcccctttgcagatgcgaccagtcaaacctttgaaacactttctgatctgctggatgactattatcgagacaaggctgagcgcgatcgggtgcaacaacaggccagtgaattaatccgcaaggttgaaaacgatcttgaaaagaaccggaaaaaattagccaagcaagaggcggagttagtggcgaccgacaatgcggaagaattccgccaaaaaggagaattgctgacaaccttcctccatcaggtaccaaacgaccaagaccaggttgttttggacaattactataccaacgagcccattaccatccaactcaacaaggccctgacccccaatcaaaatgcccaacgctacttcaaacgctaccagaagttaaaagaagccgtcaaacatttgaccatcctcattcaagaaaccaaggaaaccatttcttatcttgaaacggttgaaacagccctttctcaagcgagcctggctgaggtggcagaaattcgagaagagctaatccagaccggctttatcaagcggcgtaaccgtgaaaaaattcataaacggaaaaaacctgagaaatacctggctagtgatggaaaaaccattattttagtgggtcgcaataatctgcaaaacgatgaactaacctttaagatcgctaagaaagatgagctctggttccatgccaaggatatcccaggtagccacgtggtcattaccggaaatctcgatccaacagatgaagtgaaaaccgatgctgcagagttggcggcctactattccaaggcccgtctctcaaacctggtccaagtagatatgatcgaagctaagaaactcaataaaccaactggtggaaagcccggctttgtcacctacaccggccaaaagactctgcgggtcacccccgaagaagaaaaaatcaaaaccatgaaactaacggattgatttcaaaaataaagagagtgggacagaaatcggtaattcattagaattcgatttcgtcgtcccacctccgcacagttgagtagggctgtaaaagctgatgaaatcagcgtagtagagcccactcaaccactgcgtcttgctcgacaatccaaaaataattgagaggctaggacttttgtcccagcctcttttattctgctttattaatgtcttctttgacctcatcaacattgaatttggcaaagaggtactgacggtcttgaactgggaaacgttgatccagctgatcgatggctcccacctcaacaatcccttctgagatgacaaaatccatgacatggccaccaaaggtgtgatcatctgaaataaagtgcaaatgataaccagccacgctcacgccatggaaaatttctggtgtccaaaaaccgacgatggttcctgtaacattttcccgtgtatactctggctgatgggttgcaacctctgcaaacttcatttctggcgttgattttggaatcatacggacatgcatcttggcaaagtcaccacgtatcttaatggagcggaaaagattttccccatcataataagactcaatacgggcttccaattcctcgtccgtcatttcaaagcgttggcggaaaatcacttctgcttggtgagggacgactgctgcataaggaaccttggcttccggagaaacttcgacaatctcaggatggtcccctgatcccttggcctgatatgccttaccatctaatacgatcaactctccatcaatagaatcaagcgtcccaactccgagatctccgtgttccaagagttctccaatcgtaaatgaacccccgtacagacccgccattagagcacccaaggtattgtattgaaaaagtttcactggttccatgtttttctctcctcattctatcttctaccaatataccacaaactattccgaatcttcacgatatggtttttattagaggctatcatagagggtttgcatctgcacatcgtctggtacgatcgccaaatactggttagccacttcacgcgccttcgtcgcatctccagcctcacgcaacaaataaacataggcttcgaggaactctgggttgtcctttaaatcctcataaagctcttggtaggctgagacagcctcttctgttttctccaaggcagccaaggcacgggcaatgttccaccgggtgacaactgtttcgacttcttcattttgccaagccaagacttggtcaaagcgttcctgttccaaataaagggtggtcagtcgaagagcaatctcttcgagatcatctgctacttctttagcctctaatagataagcttctgcctgttcaggctggtgaagttcataagaaagctgagaagcaaggagcttcaattgggcatcaaagggattcttctggatcccttgtttagcaatctcaagcgctttttcacggtcattttcagcctgtaaagccaaggcataaccatactcatagccctcaaaatcaggcgacaaggtatcaatttgtttatagtagatcagggctttttggaattcttcttggtcagacaatagggtcgctaattcgtaagcaatctggtcatcaaactcaatctccagagctttctctaagaagggaacagctgcttcaaacttaccaagattggcgtaggcaaaaccaattcgttgataggtggaaattcctgttgcttccaaaatctcccgattgtctaactgggcatactcttggatagcctcttggtagcgttccaattccagatcaatttcagctagccctaattgaatgatgggatcatcagacaaatgagcagcttcaactaatttttcacgcgccacatctgctaggccttccagctgataaagatctgccttgaccaagagactggctacataccagttagactcagggccaatttcttctaaataagcaaaggcctcttctgtttggccttcctctgcaaggatggttgccaaacttagatacacttctggataggtttctgcaatctgttcatagatctcttttgcctgagggtaaaaacccatactttcaagatattgacctaaatccaataattgtgcttcactatcttctaacaaggcctgttgaaattgaacttctgcctcttctagctcttgccgatcgagagcctctaccatttgttgactatgactcactgtgtgtttcctcttctatttcattgtgttcttcatacaagccactgacgaccttataccattcaaaaatagctccgatcaccaccttagcagatgcatagactggaattccaaggaaaactccccagattccaaacatagatcctgatgtcaagagcacaaataaaatggtaatcggatgaatatttaattggcttcccaaaaccaacggtgatacaaaacgtccttcaatggtttgctccactgcaaatacaatcaagaccttgataaacatctctggtcctgctaccaagcccaatactaaggcaggtaacatggctaagaaactacccaagtaaggaatcaaattcaagatccccgcagagatcccaagtgtcaccgcatagcgcaagccaatgatcttaaagaagatgatgaacataatagcgacgacaatggctaccgtaatttgccctcgaacgtagttggagagttgggtattgacatctgagagaacttgttcagccgatttacgaatcttagtcggtaagaagcgaacaatgtggccctttaaattttttccatctcgaagaagataaaagacaataaaaggcatgataatcaaggcaacaatgacttgcgaagccactccgatcaagttgctgacccaattgacagcccgcccagagatcgaactggcccaagaagtaatgtttgcagacaattccttggtgatctcatctagctggggtttgatatctgaggagacgcgattatctagaaaatcatcgatggttgcattggccttttccaaataagttggcaggttatgaaagaaactcaccacttgtcgttggacagctggaatcactacagctagaccccaaattaaaagcactgcaatcaagaaaaagactaaggaaatcgcaaaaatccgcttaagtccttttctttcaagaaagtcaacaatagggttgagcaggtaatagagcaaaccagaaataatgacaggcagcatgactgctcctgcaaactcaaaaataggaataaaaataaaggtgattttactcaggaccaaaagattcaagcccaagagcaaggtaactaaaaatacagtaatggccttgttgtctaaaaaccatctaaaaaaccaggacaaactaaactgtttttctttattatccacaaagaactccttttcatttcaatctgtttctattttagcattttttgagcttgaagttacgaaaaaactagcaaaataagaaagaaaggccctcgccttttcaactagcaattgccttccaataggacctttgatataataaacctaacaaatcttacgaggtgacctatgtctcaaacaatttatttcggtacctataccaaaaaagaatctaaaggaatttacaaggcacaatttgaccctgaaacaggagcattgagccaacttgaactagtggcagctgagcccaatccaacctatatcgctttttctgaaaaaggcaacctctacagtgtcggagctgaagagggtaaaggaggaatcgcaagctttacagccgattttcggccgctcaatcacgttgttgaagagggagcaccactctgctatgtctctgtcgatgacaagcgtcaactggtctatggagccaactatcacaaaggccaagttctcgtatataagctagagtcagatgggcgtttgtcctttgtcgatcaagacacccaccaaggaagtggtccccatgccaatcaagcaagtccacatacccactatgcagaccttacgccagatcagtacttaatcacgtgtgacctaggaacagatagtttgcatgtctatgatgtcagtgaggaaggaaaactaaccctgatcaatcaatatcaaacaactccaggtgcagggcctcgtcacctggtctttcatccccactataagactgcctatctcatcaatgaattaaatgctacgatcgatgtactcttttatgacggtatgggtgaattcgaacacttccaaactctttctactcttccatcagactacgatggccaaaaatgggcttctgcgatcaagctctcagctgatggaaaattcctctatgcatctaaccgtgctcacaattccatcgctgtcttcaaagttgtgtctgatggtagcctagaactcattgaaattgttccaagtcaaggcctcaatccacgtgatttcacgcttagtcctgatcaaaactatttgatcgcagcccatcaagattcacctaatgccaccgtcttcaaacgagattctgctagcggaaaattgacccttctatccgacgacttctatgtcccagaggccgtttgtacggtttttcattaagtcgttttagttgtcaaacctctaaaaaaatgattgaatagatgtgaaaaaggtgcgagcctgacttcacaacttatattttaggagccataacatgaatccattggacttatttaaccaagttaaagaaatgatcgaaaagaaggatttcgacgctgcaaaaaaatttgttgatgacaacaaagacaacctcggtgactatcttgaacaagccaaagggcttgtttctggaaatgaaatggtcagcggtgccttggacaaaatcaaaggcttgttctaatagaactactcctcaacactttagttgaggagtttttgtttgagctgatcgcaaaaaagatccttgagaaaactcaaggacctttctagtctagtaaactagattattttttcaagttgtagaatgatttcaatccacggtattcagctacttcaccaagttgatcttcgatgcgaagcaattggttgtatttagcgatacggtctgtacgtgaaagtgaaccagtcttgatttgtcctgcgtttgttgcaactgcgatgtcagcgattgttgaatcttcagtttcacctgaacggtgtgatacaacggcagtgtaaccagcttctttcgccatttcgatagcgtcgaatgtttcagtaagagtaccgatttggttaactttgataaggattgagttagcagcaccttcttcgatacctttttcaaggtaagaagtgtttgttacgaagaagtcgtcaccaaccaattgcactttaccaccaagacgttcagtaagagctttccatccgtcccagtcgttttcatccataccatcttcgatagtgatgattgggtatttgtttaccaattcttcaaggtagtcgatttgttcagcagcagtgcggacagcagctccttcaccttcgaatttagtgtaatcgtaaactttacgttctttatcgtagaattctgatgatgcacagtcaaatccgataaatacgtctttacctggaacataaccagcagcttcgatagcagcgatgatagtttctacaccatcttcagttccgtcgaaacgaggagcgaatccaccttcgtcaccaacggcagtttcaagaccacgacctttaaggattttcttaagtgcgtggaagatttcagcaccccaacgaagagcttctttgaatgtaggtgcaccagcaggtacgatcatgaattcttggaaagcgattggagcatctgagtgagatccaccattgatgatgttcatcattggagttggaagaactttagtgttgaatccaccaaggtagctgtaaagtgggatttcaaggtagtcagcagcagcacgagctacagcgatagacacaccaaggattgcgtttgctcccaatttacctttgttaggagtaccgtcaagagcgatcattgcacggtcaatagcttgttggtcacgaacatcgtagccgatgattgcttcagcaatgatgttgtttacattgtcaacagctttttgagttccaagaccaccgtaacgagatttgtcaccgtcgcgaagttctacagcttcgtgttcaccagtagaagctcctgatggaaccataccacgtccgaaagcacctgattcagtataaacttctacttcaagtgttgggttaccgcgtgagtctaggacttcgcgagcgtaaacatcagtaataattgacatttcttactctccttattgagttatattttttactcctctatcatatcgtaattaggctattttttcaagaaaaaacaaggaaatctacgaaaattgagaagtttttaacaagaaaacggttccactttcttttttccttccatttccctccttatttaattttttcgcattcttctattcttctgttacgctttatgctatactaagcttatgacagatattaataaaacaattttagaaaaagctgctggtcctactcgattcaatccggatgagcagcgtcgatttttggagacttatgaggagcgggtgattgcttcatgcaccttggaggaggcaagggacaagatgtacctagagcagtattcgacaatcctcactgatatttcagatcgctttcatcctgttttggtcaagatctccccagctttagatgaaagcagccagctacaatatttgaaaaaaaccaaggatcttggtcttgtggcaagcatcgtttcggatgactgtcgccattctccatttggtctcatcatccatactgaccacccatctggaatttcaccaacagacatgagtctccagtatccaaatttatttgaaaagaaaaaagagactgccagtccagaaaagaaatcattttggcaacgtctctttagctaaagaaaaaccaatggaagggaacatctcctttccattggttttttagtttgctttcattttcaaaaggttccctatatttcgagcgcaggaaatcagatttctttcagcatgagcgagtgcatctgctacctcacaaggcccaggtacgatagagaaggcagcatcaatgttttgactaggaaacgtaggcaaatcctctgctaagctaccacaaatggctatcactggtatcttttctggtgttcgtttggccaccccaacaggagctttcccagaaagggattggagatccatcctaccttctcccacgacgaccagatctgctttttgaaccttacgatcgaagtcgattagatccaaacttttctcaattcctgaagaaatcttccctcctgcaaaagcgaccaagccagcggccatgccacctccagctccggcgccagccatggacaatattcgtgcatctactaattggtaaaaatccttcatagcctggtcgacagctggaaacagaaggggattcaagcctttttgcccaccaaaaacataggttgccccttgactgccacagagaggattggttacatctgttaagacttggagatcgatgtcttgcaaagcatttggaaccgcactggtatctattctagccacacgaccgagcgaggctcctacaggacgaagcagatggtcttgatcatcatagaaggctaccccaagtccagctgccatcccaatcccaccatcattcgtcgcagaaccaccaattcccacacaaatcgttttaaccccttggtcaaccaattgcaaaatgagctcaccaattcctcgtgtttctagttcaagaggatttcgtttttcagctggaatcgaacctaaaccgacaagagaagccaactcaaaaaaagccatctcatctttttgatagtaagacatcaaaacgggctgtccaaatggtcctgttacttgagtttggtactccgttacattcagaactctagctagggtttccatggttccttcgccaccatcccctataggaaggaggtcaaaagtcgcatctggtagagcctcttgaaatcctttttttaaggcttctgctacttgtttggcagataaggattctttaaatgaatccggtgctaataagatatgcatgctgtttcctttctatacttgtctaaaatttcaagaacaaggcttagatccctcttctcgatacgatatggggctcgctcagctacgattggctttgccataaaggcaatcccgataccagctgtttcaatcatcagaagatcattggcaccatctcccatagcaatcgtctgacttcttgggacatgattttctctcgcccatgtcaggagggactcttttttcatttcaggagtcacaatttcaccgaggacttcccctgtcaaacggccatcagaagtctgcaaacggttggctcggacaagatcaattcctaaagacctcgcaatgggatcgatgacttcatgaaatccccctgaaacaaggccaaccttgtaacccctttgatgaagttccgtgatcaagcgatctgctcccggtgtgacttcaatctgctccaaaattttcggaaagatagaggtctctaatcctttcaataaagcgacacgcgcctctaaagatgttgcaaaatccaactttccattcattgcttgtgctgtaatctttgcaactttttcccccacgccagcaacttgagctagtagatcaatcccttcctgtcggatcaaggttccatctacatccataacgagaagacctgttatttctttcatcgctttcctttcatatttcttccttactatacaaaaatagggtttaaatttcaagtttcactgatcatttgaagattgtaaaaaaatgacctcctaaaaggtcatttttctgttattagaagcggatttgctcccttgttttttcatatgaagttacaaagcgatcagtcactccagcttctaccatctctaaagcatctgagatcactttaaaggaagccgcatagtcatattctctttcgaaaatataaagtgactcatcaaaagctgcttgaacatgatcatcaaatgaacgatagcgatttgaatattgcaacaactgctccgttaaagtggcattttgtacaattcgatacgttgcttcttccaattcattcatatcattagtcaaaatctctaacaaacgattggttgattcaatgttaatcttttcgccttctaattcatccatcaaagcttctgtattattgcttgctgtgaagaataattccaagaattcttgagggattcctggcaagttacgcttgtccatatagcgtttgatcgcatgcaatcgattcgcatagatattggctttttggcgagcgttagcatcatccttctcaatttttgaaagagaatcatttaagttgatttgttcatcttcaatttctttcaaacgagcctcgattgcttctagctcttctttcaagattgaataagctttttgagtttcagatgaatctttcaaagcatcctcaaccacgtcttcttgtgaagatagctcagcttctaactcttttaactgttggctaaaagattcattcaagacgaatgttttaccgagacgctccacttctgctgcaaggttgctgttgttatcttttgcatgtttcaaataaccaggcagttgtttcaccaactttttcacaaccttttgtgattcaatttcacgggtaaagatgtgatacaaagcatcaatttcttcttgaatttgttcattttcgtaaatagcattgtctaattcaagagctgacacatttgacatgttattctttagagaagcatgcaattgttggaaacgagattctatgtcggtttctgtgaaatgataacctgattccaaaagtttacggtaaccactttccaaatcttctaattgatctggaagttttgcctgaagagctgagacaatctctggtacacgttcaacaatgtgtgtcaatgctacgatgtgactctcagctgtatcaaggatttcagctgcttcaacaggatctcctgaggaatttaaagtcacaaattgtgaaaactcagactgaatattgccgacttgcttttcgatctcagaaagagcactaccatagcgatctacatctgaagttacttctttttgtagattctcaaacatatccaaggcatgaaccacacggccactattcttttgctcttgttcttcaagatcagaaagggcttggcggatcgacttgatatcttcatcaattagctggatctgactctcgatattattaatggcttgtttggccttcatgaaacggaatgaattattaaagccttccgcttcaaacaaattgttttcaatatcagcaaatgaatttaaggataaatctacccatttttgattccattcacgaaatgcaatttgactttgaccaatcaaatgcatgtttttcacagcctctacttcatcgttgactggaaggttgtataacttttcttttctttcttccagtgcagccagtaaggcttcgttccgttttctcaaaatcactgcaaccacatatcctacaattaagatgagggctacaacaatgatgagaataattagtccactagacatataaaaactccttcatcgtattacttgaacgtaatcctagtaattataccataaaatatccattaatgggaagcgttcgttgaattttatacatcgagtgtactatattcagcgttttcttcgataaactcacgacggggttctactctatctcccatcaacatatcaaaaattttatctgcttcagcagcatcatctacagatacacgcgccatcaaacgatgttcagggttcatagttgtttcccacagttggtgatcatccatttctccaagacctttgtatcgttggatagttggttttgagcgaccttctgaatagcgttccaaggctgcagctaattctgcttcttggttagcacctggctggatatattctttaatttcactacccactttgaccccatagatcggtggctgcgcgatataaacatatcccgcttccaagactggtttcatatagcgatagatcaaggtcaacagaagggttcggatatgagcgccatcgacatcagcatcggtcatgatcactaatttttgataacgcgcttttgtaacatcaaattctgcaccaaatccagttcccattgctgtaaataggctacgaatttcttcattggctagaattttgtccatacttgctttttcaacgttcaaaattttaccacgaattgggagaatcgcttgaaattcccgattccgaccggattttgcagatcctccggctgaatccccttcgacgataaagagttctgtttcttgtggattatttgaagagcaatctgccaatttaccaggtaggttggaaatctcaagccctgatttcttacgcgtcacctcacgcgctcgcttagcagccacccgagctttcgccgctaaaatccctttttcgacgattttcttagcaatttgtggattttccaaaaggaaatcagaaaaggcgtcactaaagagtcgattggtaattttaacaacttctgaatttccaagtttggttttggtttgtccttcaaactgtggattaggatgtttaaccgagataactgctgttaagccttctcgaacatcctccccagttagattgtcttcgttttcttttaagagcttatttttcttagcataatcattgaccacacgagtgagagctgtacggaagccctgttcatgtgtcccaccttcatgggtatgaatgttattagcaaaactcatgaccgtctcatggtagcctgtggtatattgcatagctacttcaactgtaatatcatccatttcaccatctgtgtagattggtttttcaaagatgacatccttgttttcattgatgtattcgacgtaactagagatcccaccttcgtagtggtaatgcttttcttgctccaggccttctcgcttatccgtcaaagaaatacgcaagccacgattcaaaaaggctagttcttgaatccgtttatttaatttttcaaaatcatactcggtggtttccgtgaagatttctgggtctggaataaagtggacagttgtccctgtccgatcagtctccccgatgactttcaaatcatccacaacgtgtccacgtcgatactcttggtaatagatactgccatttttatagacgcgaacatcgagggatgtggagagggcattcacaacggatgaccctaccccgtgaagaccaccagaaaccttgtagccgcctccgccgaattttcctcccgcgtgaagcacggtaaagacagtttcaacggcaggtcgacctgtcttttcttggatatccactgggatcccacgaccatcatcgacaaccgtgatagaattatctgcttcaatgaaaacttcaatatggctagcaaaaccggctaaggcttcgtcaatcgagttatctacgatttcccagaccagatgatgaagaccttcttttgaggtagatccaatatacatccccggacgcatccgaacggcttctagtccttccaagacctgaatctgactggcgtcatattcttgtgcttgattttcttgctgtttatcctctgtcataatttcccttttctattcaaatataaactggtgtaagtgtggcatggaatcaaataaataggtcgaaagccctgcggcctccccagcttctatatcgatcggacgatctccgatgaccaaaccatcttgaatgccatatttttccttcaaataaagcatagaggctggatctggttttcgaggaaatccctcgtctgctgttacaatctccgtaaagaagggggcaatgcctgtctgttcaataagggtcagaacttggcgatcccgatgagataccaaaaaatggcgtcctccatgtgcttgtatctcttctagtaactcttttgccccctcaaataagaccggctcttgcaagcccaaggcttcttttttcttgtattccgtacgaaaattggaaatatgaggtgcaaaagtttgaattgcatcctgtgttgagatttttaatgccgcataaacagaatcatgatcggcttggatgtgaaagtccttcaatgtcgctacaaaggcatttgtggacgtttcgtaattatccaatagcgtcccaccaagatcccatataaaatcatgataattcatagtcaatattataccacaaatggacaaaaaaaataagctaaaaccctcatttagggggattttagccattttttacggtcatttcattttaaatcaaagagaagtcattttccgtcatagaatgtgatctttcaccagaaaaaatggtgtccaaaagagctcttttaagcatctccaaagacgtcttgatagagcattcctttacgaaggctttgggcatctcctccaaattgctctaccaaggcataggctaaggcaagagcagttgaaggaccacgactggtcaggagattaccgtctttcaccactgtttctttttgatagtgcccatcttgaatctcttcttcaaaaccatcgtaacacgtatagtgtttttcttttaagagaccggcacgcgccaagacaattggtgctgcacaaatcgcagagatgatctttcccttcctactttcttcttgaagggctgcaatcaattccggattatcccgcaaatttgcggctcctggcatcccacctggtaagaagattccatcataatctgacaggtctccattccagaggcggtctacttccacagtgatctgatgagaccctgttaccgtttctcccataccaatgaggtcacagtcgataccagctcgtctcaaaacatcgacaatggtcaaagcttcaatttcttcaaaaccgtttgctaaaatagttgctacttttttcatctacattccttctttctattgcgccctcttaaggacaacttttttacggattggcaccccttcctctggctctttctttttgctactatgattgtaaattgagagaaccagtccaacaccaattagattactaataatagacgatccaccttgtgagataaaggggaggggaatcccagtcaaggggagaagacctgtcactgctccgacattttcaaaaatatgaaagaccagcatcataataaatccaatggaaatataggtataaaactggttattggactggagggtgatttttaaaattcgataaatcaaaaaaacgtataaaatcagaagcacaagtgagccaacaaaaccaaaatcttctgctattactgtaaaaatcatatcactttcccgcacaggaactaataaattggaaacattaaatccctggcctgacacgcccccactagcaatagccaactgtccttgcgcttgctggtaggttgtcgtttgtgcgtaatcaaaaggatttaaccaagccaaaatccgattgatttggtaggttggcattcttaattgctggtgaagaaaagcacgacctccttctgataaaaagaggaagagaaagccagcaaggcctccaacaatgaacaagaccactggtaaaatgattttccaagaaactcctgaaatcaggactaagccagcaaagatcgccaaaaatactaaggctgttcccaaatcctgttggagagccaataaggcaaagacaggtatcgtatagatcatcaactctagaatcaaaagccaatcttgtcgcaaccagcgctcacgccccttatttctttgtaaaaatctgacaatggagcgtgacagcattagaatgaaaggaattttcataaattctgaaggctgaaataaggtgatgtttccataagccacccagtttttagctcctgttgaagctaccaagtttggattataaaagataagaggaaggaccatcaagatcaagccaagtaggtaaagaaagggagtgattttccatagaaatttcgtgctaaatatcgtgacaatcaagcaaacaacacaccccataccaatccaagccaattgttgtcccaaaaaagaccagaccatttggggatagtcatgagaaactgctacataaacagataaaatcccaatcatgagaagggtgagaacaatcccaatgatcgaataatccaggtggatatcccaaaaatgatttttcttcattcacgttcctttctgttagagtggtaaataatttagtagaatagcatctgtagaattaagctagatccggctacacaaaaccaagcaatcaaacctactagaaggggggctgctcctgctgcacggaactgtttccaagaaaccttgcttccgattccgactaaagccatggccataaagaggtgagaaaggtcctttaggtaaggaagaaccactttaggtaccaagccgatagatgaaagaatagaagccacaataaaccagatgatgaaccaaggaataattttttttaacattcctttgtttcttccttgttgtttactccgataccattttaaaccgatcaagcccaaacagaccggtacaatcataagagctcgtgttaacttaacaattgtagccatttcacccgccgctttactgtaggaaaatgctgctgctacaacagatgacgtatcgttaatggctgttcctgaccagaggccaaattgaaaattagacatatgccatacatgccctaatactggaaagataaagacagccaaaatgttgaagaagaagatggttgacatagataaggcaatttcctcttcgtctgcttcaatgatcggcgcagctgccgcgatagcagatccaccacaaatagctgttccaaacccaattaaggtccgtagatgagatttcagatggaagactttcccaaagataatcgctgctagaaaggcaactgttatcgttggcagactaatcttcaaagaagacaagcctgtagaggcaaccgtcgcaatcggtaagctaaatcccataaagataatcgaatactgcaataatttcttaccggaccagttcagtcctggtcgtgaattctctggtaaatctactaattcattgaggacaattcctaaaatcaaagcaaagacactggagccaatgatgggaaagaaatttcccaaaaacatggcacaaagagccagtacaaatgcaattgctagtccaaatcctttatttttcattctctcaattcctttcaaaaaagtcagttgcttgctcaacaagtcgctctctcactgtcgtgtgaaggggcagcacttgttgcaaaccatctaaaatttgttttccatatcgtttggtcaccacccgctggtccaataagaggaccaaagattcctggtcttgaaaacggctggttctcccaatagcctgtttgagccttaaaatcgcgaccggaaggctatagtcataaaagggatttttcccctgttctctgagttgggtattcagcttttgaaccatgtaatctttggggttatcaaaaggaaggcgcgtgatcatttgaatcacttctttttgttgggaaaaatcgactccctcccagaagcttcctgttcccaataaaatagagctttctcctcggtcaaatcgtcgcttaatattagctgcatctccatttcgatactgggccaaatgaggaaacttcaatgcgtttgacgtctccagtaacaattcttttgaggtaaacaaaagaaaaattggttttcttagaggaagaagttcatcgatgagctgacaaatctctcctgcatactctacggaagataaagaaacgacatctgggaaatctatcggcaccaataattcctggtgttgtttgactgttattggcacccggtagatttgctgctcttggtatcctaaaagagcaggtaaatgcacttttttactaatagcgatcgtcgctgatacaaagagcacgggcacctcttcaggcacaaactccttaaaggatagtaagtcctcaactccaccatggagacgaagaatctggtggctttcaaccacttctttgtccatccaaaaggtttggtagcgctcatcaaacaattcccttagattctctagagattcgttttttaattctgatacatcctgtcgaatttttgccaccgtttgatctgataagatcgctgcttttccttgtaggacttcttttgagcaggcatttagttcaaattgaatactctccagcaaccgtcgctgcagaagatctttctcctcttcgatggcgtgttgcaagcttagaagaagagattgcaagttttcttctctttgtgaaaattgctctaaagcaaagaagagtttttgcgcttcatccactaccagaacagattcttgaagtagactcttatcatcttctagacgggttaacagataggcatggttggtcagaatcacccggctggttttcactttttcctggccgagacgccaaaaatcttcctgataaaaaagggaacgcttcgacaattggccatcgtggcatatctcagatacaaaatgaagatgacgatagagttggccaatttcactgaactctcccgtttctgtcatcgtcagccaaaccaagagttgcattttaaagcgtcgaatcatcccattatctgactcactctgtaaggcttcataaaatttatcgagttggatgtaatccttgggacttttcaggctatgaaagggaatttggaaaaaatcttggatggtctttccttccttcttcataatttgatcctgaagaattttagttgggacactcacaagaatgcgcttggaggttttggccaaaagcgttaatagataggcgtaggtcttcccaatacccgttggcgcctcgataaaacttggaagcggctggtgcaaactgtcctcgataaaggcaacaaattctctctgctccggataagcatccattcccaacagctgcatattgagttcaaactgttcagacaaatgacgactttctaaaaactgctgtggcttgcgcagatagagaccatgaacttctactaaatgagctggtaaaaaaagactactgtcttcaagcgcatcttctattaagagtcgtgattcataaatcaaacaatctgccatcgaaagaagtttttcgatcaatcctcttggtaagctcgcaattttttctctcaatttcaacagcagctgggctgttgccatagcatccgctaaagcagagtgagcatgatgcaactcaatttccaactcagccgcaagcgctcctaaattgtagcgttctaaagtcggatagaaaatttgagacaattcaaccgtatcaatccgaggagtcgttagctcaaatccttcccaaaagagggcctctgccaataaattcgcatcaaatttgacattatgggccacaaagacggcatcttctattaattcaaaaatttcttttgccacttgtgcaaactctggtgcttttttcaagcgagcatctgtcaggccagtcaattgtttgatatgctcatccaatcgttcatggggattcacatccgtctcataggattgcgtaatcctcccatcttcgatgatgacaatcccaacctgaatgatcttagcattgcttccagcactggtcgcttccagatccacaatggcatatttccgtttctgtcttgtcatagtacttaaaattatatcacgtttgagcaagctctgcagatttttttctcctttcaggctgacttcaatcctgttattttccttgcaatttgatacactattctagaaaggagtccttatgaaaatctatcgtaccgttaatcctgtagcttatgaaaacacctactaccttgaaaatgaacactccctcattcttgtcgatccaggtagcgactgggcaaccattcaaaaacaaattgatcgtatcggtaaaccaatcgtagcaattcttttaacccatacgcattacgatcacattatgagtcttgaaaaggttcgtcagacctatcatttcccacctgtttatgtccattcagcagaagccagttggttgtcttctcctgtcgataatttatctggtttggatcggcatgcggatttagaagatgttgtatgtaaggaggcagacttcctttatgacattcgctctgattaccaaatagccgatttccacttttatgttctggagacaccaggccactctgcaggaggggtctctatcgtctttcctgaggatcacctgattctatccggtgacgccctttttcgcgaaaccattggacggaccgatcttccaacagggaacgcggcacagttacttagcagtatcagagaagaactctttacccttccatcttcctacattgtctatcccggtcatggccctgaaacttctattggtcacgagaagatgttcaatcccttctttagacaatcctaaagagttctgtatcatccttcttgtaataattaaagtatacaaaaaagcaagttcgaacttgctttttaattatatcttaagaaaacgtctcatagagattgaagaaccaatcgccccgatcaaaattcctaatccaaagaggccacccaccataatcggtaccaagacatgtggactatagagatacaagttttgatctgccaagttattgttcattgatgtatagacaacattataaacataaaaaaccaaaactgaaggaactaaggctcccaagagaccaatccaagcaccttctaaaaggaatggggcacgaatatagccattttttgctcctaccagtcgcataatcttaatctcacgactacgtgaaatgatggtaattcgaatggtattcgaaatcaagaaaactgcgatgaagatcaataaagctacaccaatcaagccccagtttcggataaaggttccaagagcaaacaagcgttgggtatcgaccccaccatctttaacctcagaaactccttcaatttttttggcatcagccgaaacttgctttacatatttaggagctgttgtctctacataataagcatcatagagaggattggcatctccatcaaaaatcttccagttgttcccagccgttttgatcagtttatcgtactgttcttccttgctagaaaaatcaaccttgtcaacatgtttcatggctgttagagcatcataaaccttatggtagttttcattggtcacggtttgaccgtctttttcaatctgctcgctctgatcttgaatatctttgcgcatgtatactacaacccgcacactattttgaatatcatctgaaagcttgatagtattggcaataacagaggcgaaaatagcaaccaaactaagggtaatcataaccgagctgaccgctgcaatcgtcatccaaccatttcgtttcaagcttttaagcgactcaattaagtgtcggaaaaatcttctaatcatcgtatccgtactctccttccgcttcatcacgcactacacgaccattttcaatcgcgatgacacggtgacgtaaagtatttacaatttgactattgtgggtcgccatcaatactgtagtcccttgcaaattaattcgctccaaaagattcatgatttcccatgaattatctgggtctaagttacccgttggctcatccgcaatcaagactttcggattattgacgatagctcgcgctatcgcgatccgttgttgctccccaccggacaattcattcgggaatgagcgaaccttgtgtttcaacccaacaagatccaaaacttccataacgcgctttttaatattgcgacgacgctctccaataacttgcatagcataggcaatattttcataaacagtcttcttaggcagtaatttataatcttggaaaaccactcccacattgcgtcgcaacattggaacatcacgttttttgattttatccaaatcaaaatcagcaactttcagtgttcctttatcgtgttttacttcacggtataaaagtcgaataaaggtcgactttcctgcaccagaaggtcctacaatgtaggcaaattctcctggttcaatacgaacagatactccccgaagagctgttgtcccgttgtcgtattttttgacaacatctttcatttcaatcattgacatgtaatgaaattcctttcattcttttctgggttattccatgtagattactggagacgccatttaaggtaggcatcgataaagccatcgatatctccatccatcaccttgtccacctgcgctacttcgtagttggtccggtgatccttcaccatggtgtatggggtaaagacataagagcgaatttgacttccccaggtgatctcttttttatccccttttagagaatccacttctgctgcttttttctcttgctctaattgatagagtttggcctgaagcatcttcattgctcgatcacggtttccgtactgagtcctgtccacagtagaagcaacaacaatccctgtcggaatgtgggtcaagcgcacccctgtagaaaccttattgacgttttgtccaccagctccaccagagcggaaggtgtccattttaatatcatcgtctcgaacttcaacctcaatcgtatcatccaattctggcataacttcaacggatgtaaaggaggtatgacgacgtttagcggagtcaaatggagagatccgaaccaaacggtgaacgcccatttcagatttaagaaggccgtatgcatgaggcccttcaaaagataaggtcacagacttgattccagcctcatctccagcctgatagtccaagacttcaaccttgaagccatgagcatttccaaaacgagtatacatccgaaggagcatatcaccccagtcctgagcctctgtcccccctgaacctgggtggatttctaagatggcattattattgtcatagggttcagacaatagcaaggtcatctcatagctggtcatgcgtttatccagctcctccaacttctcaatcaattcttctttgaccgaatcatcttcggtcaaaaagtccagtaaaatttctgactcatcaaagagatccaccatttgatggaaattttcataggtctgcttgagttcatttaattcttgtgatgttttttgcgcagcaatgttatcatcccaaaaatcaggttctgtcattttattttctaaaatggcaatttcttcttccaacgcctctaagtcaaagagaccccctgaaagaagctaatttttcacgatttgcgtcaattttttgacgaatttctgaaatgtccataagtacctctttctatgtatctagtctattatatcataaccttcactatttgcccaccttccaatattggatctgcaagtttaccacaactaacccagctgattttcagcatttttctattcatttgtaacctaattgttagaaaaaaagatgctcttatgctagactggtagcatgacaacagtagcttttatgtccgatttacatattgattcgaacaacttcggcgaagatgaattagagaccctgatcactcttttccagcaacataacattcaacatctccatatagcaggagatattgctaatggctttggagaaacctcacaaaaatttttagcccaactccaatgtcagcttcctgtgacttttagcttaggaaatcatgatatgctgggcctatcagaagaagccataagaccttttgaatttcaaaatattcctttttcaaagcatacactccttgccttttctggctggtatgactacagctttgttcctactctctctccccaaaaacatctccaaaccaaaaaactgttttggtttgatagacgcctccaacgaatgggagctgatccagccattaccaaaaatcttttgcaagagctggatcaagagctcatgcgtgtaaatcaacccttgattatcgccatgcactttgttcctcacagtcagtttctcctgcgtcacccttattttgaacgctttaatgcttttttagggagccaagcctttcacgagctttttagacaatatcctgtcaaagatgtcatttttggtcatagccaccgccgaattccaacgacaactattgacaccatcacctatcatgcaagacctttaggctatgtcagagaatgggagctctgcaaacaattttttgaagatttccccgaatttgatttttcaaagcgctatgatccctacaaacgctatcgcagaattaaagaccttccagaatttaaagcctacaaaaagaaaaaacttaaacatgaattttctcaagctatgatcatattaaaattataaaaataggacggcactattctcatttcaaaaaagtaaccactttagttctgaaatgagaaaccttacagtaagtatcttaataatcagttcttttccttattggtttctcaatatccactcttacctcaaggaatatgcccagtctattttgcccgcaaaaaaagccatccaaagatgactttttttatgtttaaatggcgtttttatcttttccaagtgcacgttgaacggctttgacaatctcaacgagaacaacaatcaaaagcgaaccaatcataacagctaaccattgtgtcaagcttaaatgagacacatggaagagtttgttaaatccagggacaatgatggtcgccatcaagagaacaaaggcaactggaatcgaccagttaaaggtcttgttcttgaagagtcccactttaaagatggattggtagaccgatttgacgttaaaggcatggagcaattggatcaaaccaagagttgcaaaggccatggtcaaagcgtctgcatggatttctgcacgagtcgcatgttctggagagagtaaggcccagccataaacaccaagaacgagtatggtttggaagacaccttgataaagaatggctccgaagactccaccgtcaaagaagttagatttacgtccacgaggtttgtgggtcataacacctggctcagctggttccacaccaagagcgatggctggaagagtatcggttaccaagttgatccagagaagatgtactggttgaagaacatcccatccaaagagggttgcaaagaagatggtgaagacctcagccatattggcagacaagaggtattggatagatttttggatatttgagaagaccttacgtccttcttctaccgctacgataatggttgcaaagttatcatctgcaaggaccatatctgaagcccccttagaaacctctgtacctgtaatccccataccaataccaatgtcagctgtcttaagtgatggtgcatcgttgactccatcccctgtcatggcaacaacttttccttcattttgccaagctttcacgatacgaaccttgtgttcaggtgatacacgcgcatagacagagtattgtttgaagactttttggaattcttcgtcagagagttcattcaactcagcccctgtgaagacatggtcttctgtatcatttggatcgatgattccaagacgtttggcaatagcttctgctgtatcttggtggtcacccgtgatcatgataggacggatacctgcttccttagcaacacgaaccgcttctgctgcttctggacgttcagggtcaatcataccgaccaaaccagagaagatcaggtcagactcaacgatttcagattccaaggttgggatttccttgcttgtcttataagccatcatcaagacacgaagggcttgtttggccaagtctttgttggtagcaaggatagctttcttatcttcatccgtaataggacgaacttccccattgacttcaatacgcgtcacacgtttgagcaattggtcaggagcccccttgacagcgataaagtatgaaccgtcagcttccttatggatcgtagacataagcttacggtcagagtcaaatggcaattcagctacacgtggctcatccttcaaggcttcacgaacatcaaaattgtggtctaaaccaaattgtaccaaagcagtctctgttgggtccccaatcaacttaccagatggatccactttggtatcattggcaaagttcatgatgcgaagtgtattgttgcttgctccaatttcggttgctgcactctgtaattgaccgttggtatacactttttcaaccgtcatttggttcatggtcaaagtacctgttttatcagatgcgatgatttctgttgaaccaagtgtttcaacggctggcaatttacgaacaatcgaattgcgtttggcaagggttgttgttcccaaagagagaacgatggttacaatggcaggaagaccttctggaatcgccgcaaccgcaagggctaccgcaaccatcaaaccttctaatggatgttccccacgaacgaatacaccaactaggaaagtgataatcgcaatcacaacgattaagtaagtcaaggctttagagagttgttccaagctttgcttcaatggtgtttccgtttcatcggcattggccaacatatctgcaatcttaccaacttctgtatacatacctgtgttggtcacaaccccagtaccacgaccataggttacgttcgagttttggtaacccatattgacacggtctccgataccagcatctgcctcaacaaggccagtcacatctttttcaactggaaccgattcccctgtaagagctgcttcttcgattttaagagaggctgcttctaacaagcgcatatcagcaggaaccacatcgccagcttccagaagaacgatatcacccgggaccaattctttggaatcaatttcaatcacgtgaccatcacggcggacacgcgctaatggactagacatgtttttcagtgcttcgatagctgcttctgcttgtccttcttggtagacaccaaaggctgcgttcaaaacaacaactgctaagatgatcatggcatctgtaaggccgtccattccttctgtaatcacagagagagctgcggcgatcagcaaaatgataatcatcaaatctttaaactgatcgataaacttagacaagaggctacgtttttcaccttcgtccagttcattatgaccataagtcgctaaacgttcttgagcttgagcagttgacaagccttcgattgaagagtccaattcctttagaacttcttctttactctgtgtataaaacaaagctttattttgttcttttgacaaaatagtttcctccttataactttctactaggtctcttttgcacaaaaaagagacctgtttgaaaaaacaagtctcgccgtttaatatagtgccggaaataatttcgtaatgacgacactatcgcggaaatccgccagctactcccttgagtgcttttattataccatttttatagaataaagcaagcaagacctctaataattgatgaggcctactcttcccattcaaccaataattggtaattggcaaattcctgctctccatcgagagttaacaagcgataagagagctgcaaattcccttcctctaattgaaagaggtctgttgtaatcaaaaattgctgaatgcccattggagttgggatgattgccccaccatcttcatttttataaaaacgcatgatggatttaggagttgagaatcgtgtcatgatcaattcatcgttggaaaatttcaaagcaaccttttcatcttcttcattggtatacaagagatattgaaaacctgctttttccttccattctccttgatagtactgatcaacgatttccatttcttctccaaatcgaatggtattttgaattcgaatctgcatctttgtctccttcttattctttccttacttaactattttatcaaattttacgtattttgactgcccccgttagcctctagatcgcaaaataggcttttttttgctataatagacccatgaatgaaaaagtctttcgcgatcctgtgcatgattacgttcatgtggatcatcccatcatttatcaattaataaatagtaaagaatttcaacgactacgccgcatcaaacaactagggacatctggatttaccttccacggtggggagcatagtcgtttttctcactgtcttggtgcctatgaaatttcaagacgcattctgtctatttttgaggaaaaatatgcagaacaatggaattctgatgaaaacttactgaccatgacagccgctcttcttcatgacattggacatggtgcctattcccataccttcgaaggactctttgggaccgatcatgaaaaaatgacccagctgatcatcaccagtccagagacggaggtcaatcagatcctcttacaggtagcacctgatttcccaaatcgtgtagccagcgtcattgatcatacctaccccaataaacaagtggtgcaattgatttctagtcaaattgatgtggaccggatggattatttgctacgagatgcctactttacgggtgcttcctatggaaaatttgacttgacccgtattttgcgcgtcattcgtccgattgaaaatggcattgccttccaacaaaatggcatgcacgctgtcgaggattacgtggtcagccgttaccaaatgtatatgcaagtctacttccacccggctactcgtgccatggaagtcctccttcaaaatctactcaaacgcgctagaaccatttatccagatcagaaagagtattttcaactgacttcgcctcgcttgattccattttttgaaaaagaggtgaccattcaagactacctaaatctagatgacggtgtgatgaatacctatttccaagtctggatggatagcccggataccatcctgtccgatcttgctcagcgctatattaatcggaaagtcttcaaatcgattctatttacagaagataagcgaaaagacttagcaatccttgaaaaattgattaaagaggttgggtttaatcctacctactacaccgctattcataaaaatttcgacctgccctacgatatttatcgaccagagcttgaaaagccacggacccagatcgagatgattcgaaaagatgggagtctcgctgaattgtctcagttgtctccactcgtcgctgctttagcaggaactcgctatggggacaaccgcttctatttcccaaaagaaatgctggaggttaatggacttttcagtaagcaagtagaggaattcacttcctacatcaccaatgattattttacaggagagacggatgtccattaaattagttgcgatcgatatcgatggtacacttctcaattcaaaaaaagagatcacaccttctgtatttgaagccattcaagacgctaaagccgcaggagtcaaaattgtcattacaactggacgtcccattgcaggcgtttcaaaactcttaaaggaactccatctgatggatcctggagactatgtcattacttttaacggtggcttggttcaagaaactgctactggaaatgaacttatcaaagacctcttaacctatgaggactatctcgatatcgagtctcttgcaaacaagcttcagattcactctcatgccattacaaaagacggcatttataccagtaatcgagatattgggcgctataccattcatgaatctcaactggtcaatatgccagttttttaccgaactcctgaagaagttagagagaaagaatttgtcaaagtcatgtatatcgatgaaccagaaattctggatgttgcgataaaaagaatcccaaaagaatttcaggatcgtttcacgattgtcaaatcagctcctttttatttagaaattctaggaaaaactactaataaaggtgctgccgttctccatctggctaaacaacttggaatcaagaatgaagaaaccatggccattggagacgaggaaaatgatcgttctatgttagaggttgtcggtcattctgtcgttatggaaaacggaaatccagccctcaaaaaaattgctacacatattaccaaatcaaatgatgaatctggcgttgcatatgccattagaaagtgggtattataaaaaatgtaccattaccaactaggaatttctaccaccgaacatgatgaatttgtcattcagagtaatcagaccaacctcttgcagagtagctcgtgggcaaaaatcaaagataattggggaaatgaacgggttggtttttatcaagaagaccagttagtcgctgttgcaagcatcttgatccaacccctgccacttggtttttccatgctctatattcctcgcggccccattatggactaccaaaacaaagagctggtttcatatgtgatccagtcccttaaaaaaattgccaagcaatacaaggccttgtttgtgaaatttgatccaagtattttcttgagcaaacacttgattgaacaagaaaatacggaaactcctgctgtgcaagcggtgatcgataccttaacaaaagaagggattgaatggactggccgaacaaatgatatggcagaaaatatccaaccacgctttcaagcgaatatccacaaagagtttttcaccgaaaaagatctttcaaaatctactcgacaagccatccgaactgctcggaacaaagggatccaagtacaatttggcgggactgaattgttagaagactttgcttctctcatgaaaaagacagaagctcgtaaaagtattcatttacgtggaaaagactactacgaaaaactgctcacaacctaccaaggacaatcctacattactttgtctactctagatctcgagaaacggaaaagctcccttacaaaagatcttgaaaaaaacaaggctgaagctaaaaaattcacagaaaaaacaaagcctggcaaggttgagaataaccaaaaagaaaaagagcgcatagaggaagaactgcaatttcttgagcaacatctccaagcaggtagacaggttgttcctttatctgggaccttaacccttgaattcggtgggacgtctgaaaatgtttatgcagggatggatgaagaattccgccgttaccaacctgctatcctcacctggtatgaaaccgcccaacacgcttttgaccggggggcttcttggcaaaatatggggggcattgaaaattcactcgatggtggtctctatcattttaaatcaaaatttaatcctgtcatagaagaatttgttggggaattcaaccttccaaccagtccactctatccacttgtaaacaaggcctacaagatccggaaaaaattaaggagtaaataagtcacatgaccctcacgacaatttcaaaagaagaatttacctcatttgctaataccgtctcacatcgctctttcatccagtctgtagaaatggcaaatttgcttgaaaagcgaggaaataccgttcaatttatcgcttggaaacaaaacgatcaagtccaagtagcggctattttgtacagtctttccatgactggtggtctccatatggaaatcaattctggacccctctaccaagaggaaaccctgctagaacccttctatgcagccttaaaagactatgcgaaaaaaaatggcgctattgaactagttattaaaccctatgatcactatcaaacctttgacagtgacggcaatccaatcagtgaagaacagagccattttttagatacacttaaaaacttaggttatcaacatgatggtttccaaacaggttatcctggaggagaacctgtttggcactatctaaaaactatcaaggaagctgactcaaaatctctactaaaatccttcaacaaaaactgtagtcgcaatattacgactgccctaaactatgatatttccatccgaaacattaccagagaagaaatccctcagtttaaacaaattatcgaggaaactggtaagagacaaggttttgaagataaaagtctgagttactactatgatttgtatgatagttttggtccaaatgcggaattcgtagttgctgagatcaattcaacagctgcccttgcccacttggatcagaaaatttccttgctaaatccatcctctaaacaatatgaacaacaattacaaaaactagagaaacaaaagaatattgttcgggaaactttagctggtaaagaatctgaaacagttcctttagcatgtgctctcataatctataccccctcagaagtcacttatttatttggaggatcttatactaaatatcagaaattttctgctgctttcttgattcaataccattcaatgaagcgagcattacaaaaagggatcaccttatataacttcctaggcattcaaggaatctttgacgggtcagacggtgttcttcgttttaaacagaacttcaatggctacatcgttcgtaagatgggaaccttccgttattatccccatcctctgaaatacaaaatgatttctctcattaagaaactattaggacgttcctaactcaaagggagtgggaaagaactccgtaaaataaaaaaagttgaaaaggttccccaaaccttttcaatcttcccacccccgcatagcttcaacagtctgggagactgttgaaggttgtggataaaggaaactttgtttccctcattaggtcatctttggagcttaaaaggcgaacaaatacttaggaaccttgcttcgcaagtcctatccaccacctcaaagcagtgctttgagcaatcaaccactacgtcttgcacttattcctatcaaacatcaaaggctggacagtttttgcccagcctctttctactataaaaaaagacgagaaacctctcgcctttttatatgtcattatttaacgaagtcaagcaatgccaagaagctttctggatcaagtgacgcaccacctacaagagctccgtcaacgtctggacaagccatgtattcagcaacgttttcaggtttaactgaaccgccgtattgaacacgaactttatcagccacttcttgaccaaagtcagcagctacaacgtcacgaacaactttacacattttttgtgcgtcgtcttgtgaagctgatttaccagtaccgatcgcccagattggttcatatgcgataactgttgaagcgacttgttctgcagtcaatccagcaagagcagctgaaacttgagcacctacgaattctgctgctttaccagcttcgtaagtttcaaggctttcaccacaacagatgattggaagcataccgttcgcaaagattgcttttgcttttttgttgatgtcttcatcagtttcgtggaagtagtcacgacgttctgagtgaccgataacaacgtagtcagtaccgatttctttcaaaacttgtgggctagtttcaccagtgaaggcaccagcattttcaaagtaagtattttgggcagcaactttaaggttcgaacctttagcagcagcaagtactgtagtcaagtcaactgcaggagccgcgattccagcttcaacaaggtcagctgaaggaagttttgatgctacagcttcaacgaatgcttttgcttcttctggatttttgttcattttccagttaccagcgataaatggtttacgtgacatttcacatacctcttttttctaattttatactatctattttaccataattttcgtcataatgaaaggttgcacaagctcattttactttttcccaaaataaaaaccccgtcttcacggggttttctgtctgtctatataattgttaatctgggaactagatcgaattaagcttcgatttcagtaaccatacctgaaccaacagtacgtccaccttcacggattgagaatgtagtaccttgttcaacggcgattgggtggatcaactcaacgtcgatagtcacgttatcaccaggcattaccatttcagttcctgctggaagttcgatagatccagttacgtcagttgtacggaagtagaactgtggacggtagttgttgaagaatggagtatgacgtccaccttcttctttagtaaggatgtaaacttcacctttgaatttagtgtgtgggttgattgaacctggtttagcgataacttgtccacgttcgatttcatcacgttggataccacgaagaagcacaccaacgttatcccctgcaagaccttcgtcaagttgtttacggaacatttcaacaccagtaacaactgctttttggatttcttctttgataccaacgatttcgatttcatcattgacacgaacaacaccacggtcgatacgtcctgaagcaactgtaccacgtccagtgattgagaatacgtcttcgactggaagaagcaatggtttgtcagtatcgcgttctggttctgggatgtactcatcaacagtatccatcaattccatgatgatatcttcatatttagagtcaccttcaagagctttaagagctgaaccttggataactggaaggtcatcacctgggaaatcgtattctgaaagaaggtcacggatttccatttcaaccaattcaagcaattcttcatcatcaaccaagtcaactttgttcatgaagacgatcaagtgtttaacaccaacctgacgtgaaagaaggatgtgttcacgtgtttgtggcattggtccgtcagttgaagctactacaaggatagctccgtccatttgagcggcaccagtgatcatgtttttaacgtagtccgcgtgtcctggagcgtcgatgtgagcgtagtgacgtttagcagtttcgtactcaacgtgtgcagtgttgatagtgataccgcgttcgcgttcttctggagcagcatcgatagacgcatagtctttaggttggttaactgatgaaggcaagcgacgtgccaaaacagttgtgattgctgcagttagggtagttttaccgtggtcaacgtgtccgattgtaccgatgttaacgtgcggtttactacgatcgtatttttcttttgccatttgagtaaaagcctccaataaaatatattttatagatagacagtaggcaatacagtctaactttccttactattctatcgaattttagataaaattgcaagccttttacctatattttcttaattattcctcttcttttcttttattttgtcatcttacagaaagttcttgatcaagctttgaaaattcccattaaaatctgctattcaagctcgttaatcatcttctatcacttccttccagagcagaaaaaatcggaacaattgttccgattttttagcctgaatttcgtaatcctgtagccactccattgatagtaatatggatcagcttgtcttgatcggctggtaattggccggtccgttgacgtcgaatcaattctaactgaatatagttcaagacgttaaagtacggcatccgataatccaaactttctttcagataagggttttccgcgagcaactcgtcttgttcctcaatcatcaagatgatatccttcgtcaattgccattcatgtaagataatttgataaatattgcgcacttcttcttcttcacacaattgcgcgtactcaaaggcaatatccatattggcttttgataagaccatgtccacatttgacaagagagattggaagaaaggccagtttttatacatgtatcgaagagtttcgatattttcaggatcctcatcgataaattccttaaagctagaacctactccgtaccaaccagggaacatcacacgactttgtgaccaggagaatacccaaggaatcgcacgtaaaccaccaatttctgtaatagtcttacgagcagctggacgcgaaccaatattaaagctagaaatagccttgatcggacttgattcaaagaagtagtcatagaagtgctcatttccaaagaccaaatcacgatagatatcataactacgattcacgactttatccatgacttccccgaaacgatcgaacatagagaatggactcttttgttcggcaatcattcggttaatggttgcagagacgagcatctcaaggttgtaataagctgcatctttatttccatatttatttccgattacttccccttgctcagttaagcgaattcggtcattaatcgatttcaatggttgagacgtgatggcttcataagtaggacctccaccacggccaacggtaccaccacggccatggaagaaagtgatcttcactccaaactcatctccaattgcggtcaattgttgttgagctttaaagagggtccaacaagaagacaaataaccaccatctttattggaatcagagtaacctaacataatttcttggtaattattcttagaagcaatccaacgtttagcgattggaagtgacaagtagcttctcatggtttcttctgaatgatccaagtcttcaattgtttcaaacaatggaacaatttgtacacgtgctttttcagtatcaattaagcccacttcttttaacatcactgccagttccaacatatctgatacgcttgttgcatgggagatgatgttttgacggataacttcttcacccaagcgatccttcaattcacgcgctgtctggaaaatcgccaattctttttcaagcaactcagatttatcggcatgggttgctgataaaatacgtgggtcttctaagagttctttcaagagaatctgacactttttgtcctctgataaatctgaataatgatcattaatccctgctgatttcagcaattctgccacacaggcttcatgcacactagaatcttggcgcatatcaatagatgcaaggtaaaaaccaaagacatcgatagcttctaggagttctgcaaactcaccggaaatcaaatactctgatttattttctaacaaggaatctttaatcttttcaagatcttctttaaactcttgagcggacgcataagctggagattctttagcagaaatctcttttaaggcgcctgaaatccgattaccaatataatcagaaacgggcccttgttggtgattacttgctcccaataatctctctaccgcatagcggtcttcccttgtttcaccaaccatagtccattcttttaagttaaccaaggtttggatcaattttgattggatatagtggaaagcacgacggtaaggttctttttcacgaaagactgacgtatcacttgacaaggcagccatctcagctaccgcttcactagtattagagagactagttgaaagtgagaaatgacggtataatttagaaatcttttcaatgtaatagttcaaaatgacttcactttgaatggttgctgaacgttttaaagtatcagccgtcacaaaaggatttccatccctgtctcctccaatccacattcccattgtaattggatgtggttgttcgagctctaaaccatgttcttttgctaaacgtttgtattccaacacgaggtttggaacagcttgtaagaaggaactattgtaatactccatgacgttggtgatctcatttgtcaccttcaattttttatcacggatcatatccgtttgcatcatgatttcaatattacaacgaaggttattataccacttattctcattgatcaatcctgctttaacatcccgatgttggcgaagtaaagcatgaatatgattggtcaaatccagcatggtctttctttgcacttgagtcggatgggccgttaaaacgggtacaatatttagattttctaaaatttcttgtgcatcttcattttttgcaacttctttaatcgttgaagaaagtttcccaagataatcgccatccacattattaagatgattgatttcataagctaaatcgacatcttcagagatgttgatcaacagtggtaaaatcgcaaaatagcgtgagattaccgtcatttcttcattagacaattgttctactaattggttcaagtcacggtaattctttgttttcgatagatcctttaattgtgaaattttttcaaatgtctccggacaaacaagatttttagtaatgtcatctaatagatctgttagaatttcggcttcttctttgacaatgtctttatttctaaagttctctaatttttgtaagaccattttttctcctttattgatcgtagtctagcaaatacaaatttagtaataagatttaattttacccttttcctcaaaaaggattccttcctgcttcattcttagtcttttttcactagcatcaatgttaagaacaaaagcaatagctacagataggacccataagctgttccctccttgggataagaaaggaaaagttaccccagtagatgggatcaaacccgaaattcctccaatgttaataaaggtttgcaccaacatcatgccaccaataccaatggccatcatagaattaaaaggattttttgctcgaattcctactaagatcactcgaagaatcaagaagaataagagtgcaaggatcaagctagctccaacaaaacctaattcttcaatcacaatcgcaaatacaaagtcagtgtgtgcttcaggtagataaccttgcttttcaattgaatttcctaggcctaatccaaaccatccaccgttactcatggcataataggaattggccaattggtgacctgcaccagtcaagtcattaaatggattgaagaaggcactaaaacgtttggctacataaccaaaaacaggaattttagcgacacggtccacaccaatgatccaaattgaaccaagaataatcgccgatccactaacgactaaaccaagcagagaagtgaaccaacggtaccccactccactagccgtaatcataatcaagaccgttaaagccaagatggttgcatttcctaagtcgggcataatagcaacgattccaatgagaatcaaagtcaaccaacgccaatcagttaaattcctaggaatccactcattatgggtcaaggcttgataatcatagtcacgtatttcatcttgccgtttagaaaaaattaaagctaaataccagactaaaataaccttaaggtactccgctggctggatactgaagcctccaggaattgtcaaccaaccatgagccccattgaccgtatcagtaacaaaccttgaaagaagtaacaaaattacctcaataaagataataacagctaaaactttcttatttcgaagaaagtttaaactaaacttgtagatcaatgcaatggtcaagagactgaggataaaaaagagcccctgcgtccgcaccatccggatcgaactcactccactttgaatcgctaaggcacttgttgtcgaatagactacaatcaaaccaatgatggataaaatcaaatagggaatgaggatggaataatttaaaagatgtcttttatcaattttcatagttcaccatattcctaatgttcaaccttcattatatcatttttaagaagcaaaaccaaggaaaggccagaaaagattcggcttcttctctatttttaagtaatattctattgattcttcttattttcatatatttttatcctttttcgatgaaaatattcctttttttagaaaataatggctgaaatcagcatcttttaagcattaagttttgccttttcgttttttttacggtaaaatgtttctgtatgagaaaaaggataaaacccgctgttctcttggtcttttttatcggtatcatttcttttctcgttctttcacgaacgattgccgatctgcaagcaagagagcgacaagaaacaaccaaaaccattccgaaccccaatacacctcgaaaaacaactactgcaagctcttcttcaaaaaaagaagaagacatcaatccagaactggttggccgtccaatcattgatatctcgggctggcaattaccaagcgaaattgattacgatgtcctctcccaaaatgtgggaggtgtgattgttcgcgttcatagtggagcccaagctaaaaaggaaaatgcagcaacctacttaaatggtctggataaatcttttaaaacccatatccaagaattccaaaaacgaaatatccctgtcgcagtctatgcttatgtcgctgctaaggataaaaaagaaatggaaaaagaagcagaagaattttacaaggctgcttctccttacaagccgacctactattggttagacgttgaggaaaaaactatgaaggatatgaatgcaggtgttgaagccttccgagcaaaactacaagctcttggtgcaaaaaatattggaatctatatcggaacctacttcatggaagaacacagtatctccactgataaatttactgctctttggattccaacatatggatttgatgatggctattataatgctgcgccagataccaatacggaatatgacttgcatcaatatacctctcaagggcaattaaatggattctcacactacttggatctcaaccaaattgctccgacgcaagaccaagaagcgatttatcggaaacttttcaaagtacaaaaagatggctcttcctcatagccttaaaacagcagatcaagtgatcttcactttttctgctgttttctatttttaaaagagaaagcaatatcaccgctattatatgttataatggtctaatgaaatctgattttgtagagaaaaagagaaaaggagaaagccatggcaaaaaaacaaaaagtgaaaaaaaccttggtcgagcagatcttgactaaagcaaaaattgagcacataggcttacaaatcaatgctttagaagggatcttaccagaagaaattgatcgctctactattttcaaaaccctagctctcaaaggagataaaacgggtcccgtgattgggatcattcctatcacggagcatctttcagagaaaaaattggccaaattatcgggaaataagaaagtagcaatgattcctcaaaaggatctcgaaaaaacaacaggttatattcatggtgccaataatccggtaggcattcgtcaaaagcatccttttcctatctttatcgatgaatctgcccttcagttagaaaccatgatcgtatctgctggggaaatcggccatagtattcaaatcaaaccacaacttctagcagacttcgttaaagcgacttttgcagatattttggaataaaaacagagaaggagccaagattgtgaaactatattttattcgacacggacggacagaatggaatgaagagggacgttttcagggatcaaacggcgattctccgttgttaccagcctccattcatcagcttgaaaaattaggaaagcacctggctactgttccttttgatgcagtatttgcaagtgatctgccacggacggtccataccgcacagatcatcctcgatcaattggagacacctctagaattgcaagcaacgcctgctcttcgtgagtggaatttaggaaaactggaaggggctaaaatttctaccatttcagctatctatccccaacaaatggatgcctttcgccataacctcgctcgctttcaaaatgaaatctttgatgcagaatctgtctatgaaacgaccaaacgtacctgtgattttgtaaaaagcctgaaagaaaaagagctcaataccgttctcatcgttggacacggagctaatttgacagcttctattcgaaccttgcttggttatgaaacaggagaactccgcaaaaatggcggactagacaatgccagcgtgacgattttgacaacagatgattttgagcactatcacttagacacttggaacgacatttcttatatggaagactaaaaaacactgatcttgcgatcagtgttttcttttagcttatttcatagttgggaagaggaggacgtcgcgaattgttgttacatttgtcaacaacataacgagacggtcaataccaattccaagtccacctgttggtggcataccatattcgagggcttcaacatagtcatagtcgatgcctgtagcttcatcatctcccaattctttagcacgcgcttgcgcttcgaaccgttgcaattgatcgatcggatcattcaattccgtaaaggcattcgcatactctttggtcatgatgaaaagttcgaaacggtcagtgaagcgtgggtcttctggatttttcttagccaaaggtgacactgctactgggtgaccgtaaacaaaagttggttgtgtcaaggtttcttcaacgaattcttcgaagaaggcattgataatttgtcccacttctgtgtagtgtttttcaactggtacatgtttttcgtttgcaagtgctacagcttcttcaaaggtcatgtcttgccagaagtcaacgcctgtgatttctttgattgcatcaaccatgtgaacccgtttgaatggttcattgattttgatctctgttccttggtagtcaattggaccatcaccgtggaccgctttcgcagcatgttggataatgccttctgttaagtccatgatatcatggaagtcagcgtaagcttgatacacttcgatcgaagtgaattcagggttgtgagtggcatccattccttcgttacggaagatccgtccgatttcgtaaacgcgttccatcccaccaacaatcaaacgtttcaagtgaagctccgtcgcgatacgaagcaccatgtcaatgttttgcgcattgtggtgagtgataaatggtttggcagccgcacccccagcttcattgtgaagcactggtgtttccacttcaaggaatccctgaccgtctaaataacgacggatttcagagatgatttttgaacgggttacaaagcgttcgaagctttcacggtttgaaatcaaatccaaataacgtttgcgatagatggtttcaacgtctgaaagtccgtggaatttttcaggcaagggacgaagggcttttgacaagtgagtgatatgagttgctttaatcgaaagttcacccatgtctgtgcgcatgatttccccttcaacaccaaggaaatctccaaggtctgcttttttgaagatctcgtagttttcttctccaacagcatccttacgaacgtagatctgaatttgaccttcacggtcttgaagatgggcaaagccaacctttccttttccacgttttgttacgagacgaccagcaataatagctgtttcgttcaagtcgtggagttgttctttatctaattctgaatatttttcttttaattgacctgaatttgcagtgcgttcgaatcgcttcccaaatggatcgattccttgttcacgaagggccgccattttctcacgacggacaatctgctggtcattcaattcttccatatgttcagtagtcatttggaacctcctaagttattctcccctattctatcatatttagaccagaaattcactaatatttaccatttaaacaaaaataagatggaagaaaaaatgcagcttcttgaatgaatactcaaaaacatctgaagaccgtcgttgactgtccaaatagtttgacctgtataagacgagatgattgaaaaggtttcgacaagctattccacaacagcatcaaaaaggagcgtggagaatcttgaaccattcatcctgactcgctcccatttttttattcatatcgcagtgcttcgatcggatttaacttagaagccttattcgctggtaaaattccaaagataatgcctacaaaagcagagaaaataatactgccgatagcgacatttaaggaaataatcggtggtccttctagggaggctgctgcgagtgtagtaatcaagctattcacaccataagcaaggccaagtccaattagcccaccaatgatggttaagaccatagactcaatcaaaaattgaaccagaatcttaccccgagttgcacccaatgctttgcgaaggccaatttctctcgtccgctcagtgacagaaaccaacatgatattcatgactccaatcccaccaactaagagagaaatccctgcaatggcaccgatcactgtcgtcataattcctactactttgttggtttcctctaggatgctatccaaattaaagatttggaattccccttggcgaacacctgatagctctgttagcttttgagcagcttcgatcccaacggttttgatttgcttcacatccggtacatagacgacaatattttgaatgtcatccgttccgaattcagaagccagttgggtattggccatcaaggcacttccacctgaagaagctccatagagggctgtccctgcatttggatctttaaacacaccaacaacccgataattgttgtctccaacagagaccacctgattcagcggattctcagatccaaataattgttgagccaatccttcatcaaggagcacaacccgtgaaaaattactatagtctgaaggagttaattttcgtccagataaaagctcaacctttttgacagaaaaataggtctcatttactccttggatgttcactccgtctgcttttttcttttgaaaagcaatggttgcattggaggtattgctaacatagtaaccatcgatgccttgaatcttggttaattccttaacccaagattcttgcacaactggtggtgcttcttggacttgaccatcaatatcttcagcattttccccatcgatatccgatggagcagccatccctcgatcttcagttgcagggccactttcgcctccaccctcacctgtatcttcagaagggccaatattgattcctgtcacatagccactcttgttgggagaataagagatttgtacatactcttggtccttggtaaaagtcttggtgacaccagctttcataccatctcccagagccatgatgacaacgacagaagcaaccccaataatgatccctaccatggtcaagaaagaccgtaatttatgactcataatcgagctgatcgcaaatttccaattttgcattaggtccccctttccagcttgctatctgaggagatcactccatcacgaatgacgatgcgacgatgcgcaaaggctgcaatttctggctcgtgtgtaaccatgataatggtttttccttcttggtttagtttggttaacaagtccattatttgctcccccgtcttggtatctagggctccagtcggctcatctgctaagacgatggctggctgattgacaagggctcgagcaatagcaacccgctgtttttgacctcctgagagctctgaaggcaaatggtgcatgcgagaatggagctctaccttttcaaggtattgctcagctaattccttccgtttagcaggatgaactcccgcataaatgagaggcagttccacattttgaaaggcattgagcttagagagaagaaagaattgttgaaagacaaaaccgatctgttcatttcgaacacgtgctaattttttctcactgaggtttccaacttcctggccttctaggaaatactctccactggtcgggcggtccaacaagccaatgacgttcatcaaggtcgatttccctgagcccgatgggcccataatggccacaaactcgccctcttcgacttctaaatcgatgtcttttaagacacgaagttcttgatctccatttttataggttttattgattccttttagttcaatcaattttgtcatattttccgatctcttttccatcttccagtttctcattaggattcacaataacttgagcatctttcttcaagcctgacaagatttcctgattttcagcatcggcgttaccaagagttacttttactttcttagccttgccattttcgaccgtccatacataactcgtatccccatcagccatgacactcgtcacgggaacaaggggatgttgagtagaacttttgacttcaatattaacagaaaagccttgtttgagttccccaatctcactggtaatatccactgtgaatgggtacttggctccaccgcttccttgtgttccacctgctgcattggcacctgcttgacccgcgtcggtcggatagttcgctacataagaaatctttcctgtccaggttttatccggataaaccttggaagtgaggaccacttcctgaccttcagagatattggccaaattgtattcagataattcccctttgacttgtaaatttccgttgctcacaatgtgaaccagagtttggttggtccccgtagtcgattttgaaacatctttgttaacttcgaccacagtgccatctgtgttactcttgaccgtcgtcgcatccagaagtgccttagccttgttcatattatcgaccgcatccgacttagcatctcgtaaatcgctagcttgagaatcgactgttcgctgggtctgcgaagctgatttggcatctgcttcttcatcgcctgtcgtatcaatggtcacaccatttgtcagtaagtcatttaactgacgatctgccttattgacagcacgaacggctgcatcataagcggtttgggcctctgtactgctatactgaacaatcggctgaccggctgttacttgatctcctacattgaccaaaatcgactgcaaatcacctttggttccatcaaaatagacatactgctcctggttggcagtaactttcccagttaacaagactgaagaagcgatcgatccatccttgaccgtttgcaccattggagtttctttcgtgattgcctgatcaggtgtacttgggtgcgaaaacaccatcacacttcctgttccaatcaccgcaatagctgcacctgcagctgcaaatagttgccattttttcaatttcttcatcgtttttctccatcaaagaaagcgttttattctataccatagtataccatatttccttacttttctatctaaaactgacacggcaaaatgaaatttaaatgcttggtaacatgctaaacccttgacttttgtaacagttgatattacaatcaaactgaaatcccatttaggaggaaaacatgaaagaatttgatattatttcaattggtggaggtagtggaggaatcgctacgatgaaccgggctggggagcacggagctcgggctgccgtcattgaagaaaaacaactgggtggcacctgtgtcaacagaggatgtgtgcctaaaaaaattatgtggtatggtgcgcaaattgcagaagctattcgcgattatggaccagactatggatttacttctgaacaaactagatttgattttgcaaccttaagaaaaaatcgcgaagcctatattgaccgttcccgtaattcctatgatggcagttttaaacgcaatggggttgaacgaattgaaggacgtgctcgttttgtagatgctcatacaattgaggtaaatggggaaaccattaaggccaagcatatcgtgattgcgaccggtgcccatccctttattccttctgttcctggagctgaatttggcgaaacttctgatgatgtctttgcttgggaagaacttccaagttccgttgccattattggggctggctacatcgcggtggaactagctggcgtgctccaccatttaggagtccaaacagacctcttcatccgaaaagatcgggttttacgtagttttgattcctacattgtcgatggcttaatggaagaaatggaaaaacaaaaccttccgcttcacaaacataaggttcccatgaagcttgaaaaattagaaaacggtcgtgtgaagatttattttgaggatatgaccagccacgtggcagatcatgttatctgggcaacaggacgaaaaccaaacgttcaggatctcaatctagaagctgcaggcgtcaccttaaatgaaaaaggattcattgcagtggatgaataccagaatacagttattccaggaatctatgctcttggggatgtcacaggagaaaaagaattaacccctgttgctattaaagctggacgcactctttctgaacgactattcaatggaaaagtcaatgccaaaatggattatacaaacatcccgactgttgtcttttctcaccccgctatcggaaccgttggcctaacggaggaagaagcccagcaaacttatggaaaagagaatatcaaagtctatacttctcaatttgcttccatgtacactgctgtcacccaacaccgccagcaagcaaaattcaaactcatcactgctggtcccgaagaaagggtcgttggccttcatggtcttggctacggagtcgatgaaatgatccaaggatttgcagttgctatcaagatgggagcgacaaaagccgatttcgatgcaactgtcgccattcacccaaccggatccgaagaatttgtgacaatgagataaaaaataagagagtgggactgaaatcggtaattcgttagaattcgatttcgtcgtcccacctccgcacagttgagtagggctataaaagctgatgaaatcagcgtagtagagcccactcaaccactgcgtcttgctcgacaatccaaaaacaattgagaggctaggacttttgtcccggcctctttttctttgtttatggtaagatggcaatggcacggacaggtgaaccagttgccttgtcccagtgagggaaagcaatcgaaatcaaggcacctacagctgggacttggtccaattggttcaagacttctacttggtagatattttgctccaaaaggtagtattcattgaccaagccatgctctgctgctggaatacccgcatcggtatcgaaggtttcatgacccacagccttgacatggcgttcatgaatcaagaattccagagcttcacggctccaccctggactttgttgaaccccattttcatccaggttacgcatagcatcttgatctggccaacgttttgaccaatcactacggaaggctacaaaagcaccctcagcaatttgcccatgctctgcctcaaagtctaagatatcttgtttgctcaagataaagtttggattggcagcaacttctttagacttgtcgataacataaagtggcaagaggagatctttgaggtcaatctcatccaaccaacgaccaccttctacaaagtgaatcggtgcatcgatatgcgttccgtattgaccaaccactgtaaatttttgaacatggaaaccatcttttaatgtgaaaagatcttcttgttgcaaggcaggaagggctgggaagtgtggactttccgcattgatttggtgactcaagtccacccattttttagcttgcaattctttataaatacttagtaaatctgacatgtttcttcctccttattcgccccaaacttcagcgacaatttctttaatcaaaccgatttttttccattgatcttcttctgtcaaaatgtttccttcttctgtcgaagcaaagccacactgagtagataggtaaagattttccaacggaacatactgactcgcttctttaatacgagcaatcacttcgtccttgttctccaattgaccactcttagatgtcaagaggcctaataccactcctttaccaggggttacttctgcaagtggttcaaaaccaccagcccgatcagtatcaaactctaggaagtaagcattgacggcttcttctccaaggagttctttggcaatcggagcataaccacctgatgaagcccaagtggaatggaagttcccacgacaaacgtgcgtattgacggtcaaaccagctggaacatgttggtagacatcgttgttaaaggtcaaaaagagatcagcgagttctcggcgaacctcatcttttgacttgccttgagctgctccccaagccgtcaagaaattatcgtctaccaagacaccccaagtacagtcatccacttgaagggtcctaagtccagcgtcatacaaatcttgaatcacttgaagataggcttgcttgatgtcttcacgaacagccgcaaaatcaggatagatggtattcaattgttctacatgttcggcatcacggatcaattcaaaatagaattgcgcaggtgctggaatggtatatttagcctctacaccatctacatctgccacaagatcccgcaagaacttgtaatgctctacaaatggatgattggctcctgtgatttttccaacgacaagtgctgagtccgccttggttgtttcatcatggaattgataaccttgagcagcttggacatgatcaatgcccccaaagccccagaagaaatccaaatgccaataagctcggcggaattctccatcagttactgacttcagaccagcggcaatttctttttcaacgaggtcacgaatcgcctgatcttctacttttgttaagtcagcctgactgatttttccagttgcgaaatcttcacgagcctgaaccaaagcggctggacgaaggaatgaaccaacatggtctacgcgataaggtgcatgtgtatgtgtcaatatgatttcctctttcctataagttttacattaattcatcaatgcaaccattatagcagtccaacacttgataaacaagggattgggataatctaatatcttttatatctatatagtcttagactatggcaaaaaaagaagtccttgaaggaccccttttcttaatttttaaatgcattgagcatgacttggaactcttcgttcgtgagtgtaataccttttcccatctttgtatggtcgggactccaggtccggatatcatacttagcaggagcaccattaaaactcacacggttcaattctttggtccaacccttgtcattttctgacaagaccagcaaatgttcttcgatttggaatgaaaattctgccatttcacgactcctttcttgccttatcatctctaatattcgtaaattatttacaaaatcgttgaaattatctataatatattgtatcaagttatggagaatttagctatgaaaaaatttctcgagatcgttaaagaccgagcaaatgaatttttcaatggaaaagtcagtacccctgccccattagaagatgagagaattattgaaatcattcaacaagcattgcgaaaaaaacaaggggtacatgttattttttcaaataagagttttacaggcgatattgtcaagtatgaccaagaacgccgacaactgatcgtgaaaaatttcaagaagagtatgtccacgattattcggatttctgagatccagaaaatcagtttggtccccaataatattcgcatcgcccaacaaaaaggagaggtttaaccctctctttttttgttatactcgaacggttttacttgccccatcttttgagtagagattgattaaaccttcctggcaagaacgaatcatatctcctggcttgacttcttgtggaaccgtaatcgtgagaagttccatcggatttggcgcgcgatcaatcttcactccatccttatcatgcaagtcttggatctggcattcaaaatgacggaagcctggtccgtagaattccacttggtcgccttcattgatgacattccgttggcgaatcgtcgcagtcatggtagatggatcaaagtcaaccacttctcctacaaatttgtattgaggaatcttacgacgtgccccaaacaattgttcattttcagtcggtgtttggtagtagaatccagttgctaattcacgttgagcaaccttccacaattcattgatcaaatcatccttgatggcataaaaggcttctggactttccatataggcatcacaagctgccttgtaacagttggccactgttgaaacataatggacagatttcatccggccttcaatcttcaagctatcaaccccattatcaatcatgtctggaatattttcgatcatacacatgtccacggctgacatagagtattcttctgggacttgccctttgatactcttgcgttcttggccaaatggcatatcgtagagatcgtatttccaacggcaagattgagaacagccaccacggttggcatctcggtcagacatgtggttagaaagggtacaacgtccagaataggaaatacacatggctccatgaacgaaggcttcgatctcaagatcggtacgcttacgaatctcagccaactcttccatggatacctcacgggccaagacgacacgggtcaagccatattctttccagaaatggaaggtctccacattggttgcagaagcttgcgtagacaagtggatattgaggccaggtgcataggttgcacagatctcaatcaaggccgggtctgagacgatcacggcgtcaagtcccatatctcgtaattcacggaaccactcaccagccccttgttcatttccctcatgggtcaccatgttcgaagccacgtgtacatctacgccatgcgcatgcgcatactcaattccttcacgaagctcatccatggtgaagtttccggcacggctacgcaaaccataggcttgtccaccaacgaacactgcgtctgccccataattaacggcaacttttagtttttctaatgttccagcaggtaccaagacctctggacgtttttttgtatttgtcatgttttctccaatttacaagattgtcgatataatgaatagcctcttcgttccctgaaaaaggaaaactctcaaacgaagaagccctagttttttattattttacacgatctggttcataatcatagaaaccagtatccaaaccacgattggctggatgcaatttgcggatttcttcatcaaacagataggcttgatcctgtgtaaatgttcctttttgaatcaaatcacgggccttgacaaagtactctgtaatcttgacaaagttttcccccggacagtagacaccatcgagtttccaatgatcaaatccgtgttctaccaactcagacaatttggtcatcatatccaagtcattatttgagaagatatgggttccatgtttgtcctcgtagactgaataatgagaatttggatctcctggttctgctaagaacaggtcgcgatctttggttacagagtcctctgtcttgatgaagttgtaataattctgaagaagaggtcgtttcgaatggtggataatgctagcaccatagaccaagacttccgctggaatctgaagattctcagccattacgaataattcggcagatggaatctcacgagccaaaacagcctcagaagctcctgcttgttttccccagaaattgatctggcggctagaagtgaccatggttgaggcatcgtaaatcgttttgaatggatagccatctcgtttcaagacataaaaaacgcccgcatctccgacagtaatataatcagcctgaatttcctttagaaaatctagaaaaggcttgattgaatccatcatcgattggtgcatcagtgcatttacagctactgtcaattctttgccagcagcatggaccagttgggcaattcgatttatttcgtcatagcttaaagtttgaggcaatcgtaatccataatctttttcaccgacatagattcggtcaacccctgcatcaatcagggcttgcgcttgctcaacactctctgctgttgctgtaataataatatttttcatagaaccattataacaaaaattccgatattctagaaaaatttattcattttgtaaaatttgtaacatttttgtaacatttatattcctgaattcatgatagaataatagggtactgttaggagagagaaaatgcccgtaagaaatttaagacactatgatgaagaattcgattatatcgaattaaccaaacaaacccaagaaacccctattcaggactatgctcctgaagttgaacccgcacctcaattaagtgaattgctatattttttaaatatcgctattttctgtgtgttgacggttgtatttagttttatctttttagcaacgaaaatgaataccttctttgcgtttgctttagcgattggttctagctttgctagtattcaagggttccgaatttactacaataaacgaaaaaaataaaaatcaggtttgcctgatttttttattcactcgaatttttttaattcctaagttgtcaaattaagttagacttttcatgtaactcagaaaaacttggtatggtgtttgataattcaaaggcttcctaggaattctataagaataaatactttttatgagttaaagttattcaatcatcaattgaaactttccgccgtgagaaaagtgcctgaaacaattatgtttcaggtactcgagagttttgaaactttaggttcaaaactaagtcatggaacttctttgaagttcgctgacgtccgtactcacttaaggaaagtttctaagatgaatttatcttcaatctgaaaagaggctcagtgagcctctttttttatgcttcttttgtttcttcttcagctacttcttcagaatcttttgcatccaactctaacacgatgtcttctgattctgtttgttttcgaatggattgaaccaagtcattgccacttagattttctttttgaagtttatccttaaatgagtgatagacttcttgagatttttcaaccacatcttgcgttttttctttgacagattccaaaacagttcctgtcgtaatttctccagatccaactttttctttggtttgttggatcacttctgcagcttgttttgaaacatccttcgcagtttgtttaacggattcatgtacttcttgaggatcttcttgataatcttttacgaatcgtgcaacttttttagtgactttctttccttgctcagttgataaatagtaggctgctgaagcacctgaaatgacaccaattaataaactagataaacgtcccatattcttcctcgattctatttaaataattttgaagccatcttaatcgcttttaatccgatagaggctttcactgttttcccaccagctgacactgctttgacactcaattgacgggcttgatcattcaaatctgaaacagactcggaaagatccgctacggctgtaaagagtgggtcaatcgttgcaactttttgattcaaatcatccgttaaaacattgacttttgccaatagatcattggtctgatgcaaggtgacattgacatctgatgtcaaaacttggatggttttttgcgtctcatctacaacttttccaatctttgagaggaaaaaaatcatataaatgacaagcgctactaaggcaagtcctaagagaccgtaggcaatttcaataaacatatgttactcctttgtttctacataataaggggcttttttgcgacgttggtaaaggatgacggcaagtccaactagaatcaggatcatcgacaaccactgggaaacacgtaagccagcaaacatcaagctatccgtcctcattccttcgatgatcatccgaccaaaaccataccagataaggtaaaaggctgtgatctcaccttgtcgcaaaaattggggcttcctacgaagaatcaagatcaagagaaatcctagcagattccaactggattcatataagaacgttggctgacggtaactaccatctatatacatttggtctcgaataaaagagggcaagtagttgaggctcttaacagcagctccataagcttcctggttaaagaagtttccccagcgaccaatactctgtgcaaccatgacgcttggggccgcaatatccaaaaaatcaattggctcaatcaagcgtctgcgagagaatagatacaagaccaatgcacctgtcaagaggccaccataaatcgcgattcctccgttccagatagcaaaaatctcaccaaggtgctggctatagtagccccattcgaaaataacgtaatagagtctggcccccacaatcgcaagcggaaaggcgatcaaaatgaaatcaatgatatcatctggattaatttgcttacggggagcttctttcatggaaagatacacagctagaatcaaaccagagacaatacaaatcgcgtaccaacgaatactgatcggacctaattgaagggctactggattcattccttcacctcattttgactaatcaactgggacagacgttcttcaaaagttttggtagcatcatagcccatttctttagcccgaacattcatcgctgctgcttcgatcacgaccgaaatgttccgaccagtcttcacagggatgcgtatacgaggaatagtcacgcctccgatttctaactcttctgcattattaccaagacgatcataaacctgatccttagcataattttccaagtaaacggcgatttggacttgtgaagaatccttcacagcactcgcgccgtagagactcatgacatcaataatcccgacaccacggatctctagtaagtggcgtaagatttcagctggctctccccaaagtgtcatctcatctctcgcatagatatcgacacggtcatctgctacgaggcggtgcccccgcttgacaagttccagacctgtctcgcttttaccgattccgctatctccttggatcaagacacccatcccataaatatccatcaagacaccgtgtacactcgtacgttctgctaggcggctatctaaatagctagatagctctccagacaaacgactcgtcgcaacattgctcttcaaaatggctagttgcttttcttcagccgcacgcaacatttcttctggaatgtctaaattccgcgcgacaatgatgacaggtgtctctggctggaacatcttgcgtaagacctgatgacggttatgagagctcatcttcaccaggtaggaccattctttcattcctacaagctgaatccgctcaggtgtgtaatagtcaaaatagcccgtcatttcaagacctggacgtgaaatgtccgcagtcgtaatttccttgcttaagaggctatcattcccataaacaaccgatagacgaagcttttcctgtatatcgcgaacagtaactgccatatcattctcccttttcaaattctctctctattatagcagattttctcttcagacgagagactgaagcgtcatttgaaagatccattttcaactcctttttaaggcaagcaaaaagaggccaagacaaaggtctccaacctctaggaaatgatggtaacatatgaagaatgctttagccttggccttgcaagaaatctttgatcatggatttacttccagtagagaccgcatagaccaccgcatttgaaggaaatgcgatcaagccaagcataaaggtggcaggtcctcccccaacaaggagaaaaccagatacaaaaccggcagaaacaaaatcgaaaaccgataaatttgtgggtctcttaccctttctgttggcagaaacaagaagtagaagagactattccaaatgcccagtggaaaaaggagcatccgatcaaaactgttccaactccttcaccaaaaacacgatttaaaatgaaaaactgtcctataaaactgaagaagagatatagaataaaagcaaggtaatagaacttctgcttcactcggatctccttttagaaaaatggactatcattctgatcatggatgggtgtactgaccccaaaaagttagacaattaatttatccaaaggatttagttctgtattgcacaggactaaatccttttagttttaccttaatgcgtttgttgttgtagtaatcaatatagtctacaatagcttgttccaattgcttaagtgagtgaaacgtcttctcataaccataaaacatctcagacttaagaatgccaaagaaggactccatcataccattgtctggactattacccttacgtgacatggatgcttgaattcccttactctctaggaatcgatgataagaatcgtgttggtattgccagccctggtcactatggagaattgtatttttataatgctcctctgtgaaggcttgttccaacattaatttcacttgtgctaagttgggcgaagtagaaagattataggcgataatttcgctattaaagccatctaaaactggtgataagtagagtttttgactgctcgccggaatggcaaactctgtcacatctgtgtagcacttttccattggtttggatgcttcaaattggcgttgaataaggttatctgctttctttccaatctctccttggtatgaagaatacttccgtttacgacgaatacgtgcacttaaaccaaggaccttcatcagacgttgaaccttcttatgattcactacaaaaccacgattccttaattcaagagtaactctacgatagccgtaatttcccttatgttcatcataaatggcttgtatttccactttgatagcttgatctttatctacttgattcagttgctttaagtggtaataataggctgaacgagcaagtttgataatgtttagaagaatatctaaaggaaactctgttaccaatccttgaacaatttctgtttttcttcttgcttcttttcgtccctcaatcggagttctctcaacttttttagaatagcattctccgctctcaggtactcattttctgcttgaagacgttctaactctgtcatctcttcaggttttttctttggtttacgtcccattttaggcggtctccctcttgttttctcaacaatagtatacccgtttttcttatattgtgctatccaattaggcaacattccaacacttggaagagcataatctagagacacccttatttgtgaacgaccttcaatcagaactttatcaatgatttctcgttttaatttaggagaataataacgattcctcccctttttaacaaactctataccgtaacgatccatcaatttaatcatgtactgaagattgggaatttttatcccaaatatatttgaaagctctttgaagcttcgcccttgttttctaagttcatagacctgaactttatcttcataagttaatttcattataaaacaccccaaaagttagattttttctgtctaacttttggggtgcagttcagggttcagcctcttttcttcgacgaggtcgagggccatagtcaaacatttcctgctcctcctcgtccttataaggcaaggtcgtatctaacagtaaatagataatcacaccgataaaggcatgagaaaccgtaaaaagaataaacaagaagcgtaggagagttacgctaagaccaaatttatcggctaagccagctagcacacctgaaaccaggcgatgtcgttttaatttgtaaaatgatgctgtcatttgattttcctctttctagttagacctattttagcagagtcgaactggaaagaaatccgcctaaagaccgattcttactcttgtctcatttcaaggaattgcaggcggctgcgacagcgaccacaagcatatttcttcagatcgatttttcgctttcgtctatactcttggccacaatggggacattgatagagatagatccgcttgactcgcctagttctatctggtagaggaggtgtgaaacgaagaccgtccacttgctggaggagttgcttaaaggctagatctttgtggcgatagcctttaccttgatcgtaaagatggtaatggcagagctcgtggcggacgattttacgaaagacctctaacccgaaaacttggtatattttcgggttgaaatcaaggtgtcgatccttgggaaaaaaacgacccccagtggtttgaagacgtgaattccactctgctcgatgacggaattctctcccaaaatcttctagggatacttggcgcacatactcagtcagattcattcggagctaccaaactgagattgactttttcgcgttccacatcaatcttcttcacccagacggtaaccaaatcacctactgagacgacctggcttggatgcttgataaactgcttgctcatatgggagatatgaatcaagccatcttcgtgaatgccaatatcgacaaaggctccaaagtcaaccacattgcgcacaaccccttctaatttttggccaatatgcaggtctttaatatccaagacatcctgacggagcacaggtgcatcaaaggaatcccgcaaatcgcgacctggttttaggagatcggcaatgatatcttttagggtttctggtcccagatccagctgagtagacatctcctttatgttcacagcttttaatttttcctgagctgatgcatcgaggtcggtcatttcaagaagttgaaaaagtttttcaacttccttgtaactttcagggtgaacgccggtattatccaagatgtttttactttcaggaatgcgtaagaatccagcagcctgctcgaaagccttggcgccgaggcgaggcacttttttaatctgtgctcgtgaaagaatcattccttcttcttcccggtatttcacaatattttcagagatggttttattgagtcccgctacatgcgctaagagagagggactagccgtattgatattgaccccaacttggttgacgacagtatctactacgaaatccaagctttctgtcagttttttctgattgacatcgtgctggtattgacccacaccgatggatttggcatcgatttttaccaattctgctagcggatcttgcaggcggcgggcaatggaaatagccgagcgtttttcaacggttaattctgggaattcgtgacgggccaactcactagctgaatagacagatgctccgctttcattgacaataacatagcgaactcctggatggtcatggaggacctctgcgacaaaggcctcactttcacggctggcagttccatttccaatcgcaataatttctactccaaactccttgatcagggaagacagatcctttttagcctgctcgatctgagctggttttgcaggagcaactggatagatgacctgggtggcaagcatctttcctgtctcatcgacaacggctagtttagcaccggtccgaaaggctgggtcaaatccaaggaccacgcgcccttttaatggaggaatgagcaatagattccgtagattctcagagaacaattgaatcgctccgtcttctgccacctccgtcaactctgtccgaatccgacgttcaatcgcaggaacgatttttttcttaaccgcttgttgaataacctcatccacataggcatttttggttttaaaacgagcctcaaagatacgaatgatccgatccagttggtgctcgaatccgactttgagaacgcccaatttttctccacgattgagcgccagggtccggtagccttgcatattcttgatcttctcagaaaaatcatagtagatttcaaaggttttcttgggatctaagctttcatccttcaaggttgacgtcatgagggaatgcccatgaatttcttgataggtgagggcccgtaattgggtatcctctgaaatagcttctaccaaaatatccactgcaccagctaaagctgcggtttcagttgggaaggcctcacaggtaaatttctgagcctctgcttccaagtctgggctattttgcaaaatgagacgtgccaaggggaaaagtcctgcttctcgtgcaatcgtcgccttggtccgccgtttttccttatatgggagatagagctcttcgacatccgctaatttttcagcagcctcaatagcctgcttgagcgcctctgtcagtttgccttgttcctcaatcttagcaaggacggtttcctttcgttcggccagagccgttaacgatttgtcccggtcaataatggccttgatcgctacttcatctaaatttcccgtcatatcttttcgatagcgggcaataaaaggaatggttgagccttctgcggtcagactcaatacggtatcgatttgttttaagctaacacccaattcttgggctattttttcatatttatccatagcttctattatagcatattttcctgccatcaaagggggagttcgcctgttctggtctctgtttcagggatttttcatagaataattttgaccctcatgttctttccttttatgctccatttcccccttgctctttcctttttgttataatgaaagaaaataaaaaggaggcccaacaatggctattaaattctcaaaaacagatgatcttgataaaatgtttgaaaattttgcgagttttccggatgtagaaaagaaagtagaatttcctgaagaaaaaaagaaggcagaaactgctacaactaaagaagcaaagaaggctaagtaatgacattctttcaacaccttccctctagcgtcttgcaggctggggctatttttctctcgattattatcgaggccctaccttttgtcctaatcggaagtatcatttcagggattattgaggtctatatcacccccgagagggtctaccgctttcttcccaagaataaatttgggcggatcttctttgggacctttatcggctttatctttccttcctgtgaatgtggaattgttcccattatcaatcgctttctagaaaagaaagtcccaagttatactgctgttccctttctggtgacagcacctgtcatcaatcccatcgttctctttgcgacctactcagcctttgggaattctgtcaagatggccctctaccgcgcccttggttccctactggtcgcaacggtgctagggatctttcttggttttattcagacagattcgatccaaaaagaacatcgtaaggctgtacatgaacatgattttaggggcttgagcaaaggtcaaaagctcttccaagtcttggtgcaagccattgatgaattctttgatacaggacgttacctggtatttggttgcctctttgccagcctcgtccaagtctatgtcccaacacggatcctcacttcgatcagtgcaacaccggttattgctattctccttctcatggtcttgtcctttctcctctcactttgtagcgaggcggacgcctttgttggatcctctcttctgacgagttttggagtagcgcctgttcttgcctttctggtgattgggcctatgcttgatgttaaaaatctcctcatgatgaaaaattatctcaagacccgttttatctggcaatttatcgggattgtgagtggagttgtgctcctttatgcttggtttgtgggggtagtgctatgattcgtttcttgatattagctggctattttgagctcaccatgtacctgcaattatctggtaagctcaatcaatacatcaacttacactattcttacttggcttatatttccatgttcttgtcctttgttttagctcttgtgcagctgatcatctgggtcaagcagatgaagatccacagtcatctctctggcttctgggcaaaagtagcgagtattttcttgctctgtattcctttgtttgtcgggctatttttccctacagtgacactggattcccaaacggtttctgccaaaggttatcacttcccggttgcggctggatcttccaaggaaatccagcaggacgaagggacaacaacccagtatctcaaaccagatactagtagctattttaccaaatctgcctatgagtcagaaatgaaacaggcggcaaagaaatatgttgataaaaaagtgatccaggtgaccactgagaattacatggaagtcatggaagttatttatgattatcctgaccaatttgcaggaaagacaatcgagctgaccggctttgtttacaatgaccccagtaacaagaacagccaatttctctttcgctttgggatcatccactgtatcgcagattctggagtctacggtcttttaacgacgggggctccgcagcatttcgaaaacaatacttggatccatgcgaaaggcaccttgtccattgaataccacaagcagctcaagcaaagcttgcctgtcctccacattagtgattgccagaccattacaaaaccggccaatccatatgtctaccgcgtattctgatggagtcaccaagtttcttcggtggtcgatccaaacagcttatagcagttgaagctagaatccacattggttctagctttttctatgctttcttctcaaatcctctaatccaagcggaaaatattcggaacaacgattccatcaaagaaatcttgtagattttatggtaaaatatggttaataaaataggaaataggtacttaaatgtcttcaaaagttattgtaaccattttcggggccagtggagatttagccaagcgcaaactctacccatccctttttagactctataaatcaggaaatctatctgaaaactttgcagtgatcgggacagcccgtagaccctggagcaaggaatactttgaatcagtcgtggtagaatccattacagatctggccgatagccctcaacaagcccaagaattcgccagtcatttctactaccaaagtcatgatgtcaatgataccgaacattacatcgccctgcgcgaattgcaaaacagcttggatgaaaaataccaaacggaacacaacaaggtcttcttcttgtccatggctcctcaattttttggaaccattgccaaacacctcaaatcagaaggcattgtggatgggcaaggctttgagcgcttgatcgttgaaaaacctttcggtacagacttggaaacagctagtcagctcaacaaggaattggaagaaacctttgatgaagaacaaatcttccggatcgaccattaccttggaaaagaaatgatccaaaatatctttgccattcgttttggaaatcttatttttgataatctttggaaccgagattttattgacaatatccaaattacttttgctgaacgcttaggagttgaagaacgcggtggctactatgatcactcgggggcccttcgagatatggtgcaaaaccatacccttcagcttttgtctttgcttgccatggataaaccagctacctttaccaaggatgcgattcgagcagagaagatcaaagtttttgagcaattgcacaatccaacagatgacgaattaaagaaattctttatccgtggtcaataccattcaggtacgatcgaagggaaaaaagatatctcttatcgcagtgagcccaatgtctaccctgaatctactacagaaacctatgcttctggtacgttctttgttgatagcgatcgcttccgcggagtacctttctttttccgtaccggaaaacgcttgacgcaaaaaggaaccatggtcaatgtggtcttcaagcaaaccgactccatctttggacatagtttgcaaccaaatgtcttgaccatttatatccaaccaaatgaaggtttctcattaagcatcaacggaaaagaggtcggagaaaaattcagcatcacaccaatttcctttgactacgaaacagatgcgaccgcaactggagcttcaccagagccttatgaaaaattaattttcgacgttttgaacaatgactcaaccaactacagccactggcacgaagttcgtgcttcatggcaattgattgaccggattgaaaaactatgggccgaaaatggagcaccgctctatgaatacaagtctggatccatgggaccaactgcatccgatgatctccttgcagagtacggagccgaatgggtttggaaacctgaacctaagaattaaggaaatccaccttcgggtggtttttttgatagcgcaaggaaacaaaaagacaaattgtccttccaacaatttgtctttttctattcgactcttaaatcaagccttccaagaggcctctcatgaagttttctgaatggaatggtccgatatcatcaatcttttctccgaatccaatcaacttcactggaatgtccaactcttcacggatcgcaaggacgaccccacctcgagccgttccatcgatcttggtcaatacaattcctgtcacaggtgtaatttttgaaaattctttagcttgcaccaaggcattttgaccagttgatgcatcgagggccagcaaggtttcatgcggtgcatcaggtaccacacgcttgataatgcggccgattttttcaagctccgccatgaggttgtccttgttttgcagacgaccagctgtatcaatcatcagaacatcgatgttttcagcgatcgcgcgttccattccatcaaagacgacgctagcaggatctgatttttcaggacctgttacaactggaacatctacgcggcgtccccattctgccagttgagccactgctcctgcacggaaagtatctgctgcaaccaacatgactttcttgccttcttgtttgtagcggtgggctaacttcccgatagaggtggttttaccaactccattaaccccaacaaagagcatgaccgtgagaccatcttgaaaacgaatggcttcattaaattggccatccttttcatacaagtccaccaatttttcgatgatcacgcgcttgagagcatctggttttttggcattttccaaacgggcttcatagcgcaactcttcggttaaattagaggccacttgaaccccaacgtcactcatgatcaagagttcttccaattcttcaaagaattcttcatcgactgaacggaaattagcaaagaaggcattgaggcgtgctccaaatccagtccgtgtctttttcaagctacgatcgtatttttcctgaatggtttcttgctgaggctcaaccttgtctggaattggcgcctctgcctcttcaacaatcctttcctcaacggctgatgctgcttctccttgaggaagtctggactcggcttctgctacttcagaagtttcctccacttgagcgatcgcttctgatacttcaggttctaggacctcatcctgagcgtctactagttctggagactcctcttctctcgcgctctcttctactggctcagcgtcaggtgatggagaggcaatcggtgactcttcttccaggtctacaacatcaatctcatctgcttcctcaccattttcagtttcttccgcttcaattttctcttcttcaagaggctcagtctcctctgtttcaccagctagtggtgaaacttcttcaggactggcttctgtttgagcaggttcaaagacaactggagactcctctactggtacttgatcttcatgagtctttgaagtcactatatcttcaacaagaggttcctctgccggctcttcttgagcgacggttgaaacaggttgatgagtggctgcaattcgcgctttgagctcttggtaataagcttccatatcagcgattttttgctcttccttgtcatttcgggtagccgccggctcctctgtgacagtttcttcaacctcagtactttccgtcacttcttcagaagacggaagcactttttcagcttcttctttttttccaaataaacgatcaaataatcccatttattcactctcctttagcacataattttcaattgcccatgcgacggcatcctggtcattggtcacaggggccacaagcgctgcaacttccttcactgctggaatcgcattgcccatggcaacccccagtccagcccattggatcattgacaggtcattagcttcatctccacaggccatgacttgatctgccttaagacccaaaatagctgccagtgcctctaaacctgtcgccttgtgaacatttttaggacaccattccagcaacatttcccgagatttaaatatttcatagtcttgaaataagtccggcctaatctgcttgatagctgcatctaaaaagtcttgatcaacggctgtcacacacttgttgtaggaaatcgtggatggcaggtctttaaaatctgtctcaataaagttcagatagggattgtaaagggaatagagagactttcgatctgcatgaatctcataaactgttccctcactgatagcatccagcggaaggcctagacgggctgtttcatcatgaatagttgcaacatcttctggtgccaagacaacttttgagagaatctctccattatttcgctgcaccaagccaccattgaaggtaatcgtatactcttctttgaggcctgctgttcccaattcttccaaaagaaaatccatggctttcaagggacgaccagtggttagaaccaccttgacaccttgggcctgtgcagcagcgagggctgctctattgcgaggggagatctttttttcagaattgagaagggtcccatctaaatccagcgcaatcaaggaaatctgactcatacaatttcctccatgtagcgtaggacagaaccagttacatggtgaccgatgactgtttcagcaatcgctaagatttcaggacgtgcattttctggcgctataggatggcccacgacttgcatcatatggagatcatttaggttgtctccaaaagccatcacctgatccatcgagatccctagtttatccgctaaggcggtaatggccactcccttatcgacataatcgaggacaatgtcaatcgattcaaaacctgtcgtcatcgctttgacaccggggatattctcagtgacccattgttcaccttcaagtacaagagctgcatcaaagttggtggtcaatttgaaaatttcatcctgaatatctgctaggcttttcactttttgaatgttttcattgtagttctgactcaaggccagatagtcgggatctactgtttctaagacatagctcccttttttcccagtcaaaagaagcttattcgggtctgcataaggtgaggatttcaaagcctcaaaaacacccaaataaaagtctttggacatggtcgcttcgtagagatcttctccatgaaattctaccacactaccattttcagcaatgaaaatcatctggtcctcaaatcctttaaagagggatttgagagaaaggagggcacggccactcgcagcagcaaaatagatgcctttttctttgcaacttactaaaaccttgcgtaaaaggtcttgatcatactgatgttggtcatttagaaaagttccatccatatccgtagcgatcaatttaatttcattattcttcattttctaagtctttcaattttactgagacgattttagaaacccctgattcttgcatggtcacaccatagatggaatctgcagccgacatagttcccttccggtgcgtcacgacaataaactggctttccttatcaaagcggttcaaataatccccaaagcgcttaacattggcctcatctagggctgcctctacctcatccaaaatgacaaatggaatagtcttgacacgaataatcgagaacaagagagccaaggcagacaaggccttttctccaccactcatgaggtttaaggattggatctttttaccaggtggctgcacagaaatctcaacaccagctgtcagaagatctggctctgtcagaatcaaatcagcaacccccccaccaaacatttgacggaaagtgactttaaaggattcacgaatggcttcaaaagttgatttaaagcgttccttgacttcgtcattcatgtcgttgatggtagacagaagcatgtttttcgcagccaagacatcctcacgctggctcgaaaggaaatcaaagcgtcccttcacctcgtcatactgcccgatcgcatccacattgactggaccaagtgccttaatatctttttcgatgctcttgagctggttttcagctgccgcaagattttcaacaggtttggcctgctctttggcttggtcaaagctttgcatgaattcatcggtaatttgcgttaaaagcttgttcaaacgatccgcatgcttttcacgcgtcgcttcagccttggcttgttgacgaatccactcttcgtttttcttgcgcgcttgttccatctgttctgcaacatcttcggcctggccttccaaatcatccagctcaaagcgtttccgaataactccttgttccaagtccgttttcttagcttgggcctgtgccaattgattggctagctgctccacatccactgtctgaacttgagcctcgccttgttcaatcagcaattgcaactgatgctcttctacttccaactgggagatcgtttcttccaagcgacgagcatctgtttgctcgtagctttgttggctcttacattcggtctgttgaagtcgcaattctgccaattgctcttgcaagttttgtactttttgttgcagaacatctttatccgacttcatggtttcaatatcgcgattcaagttttctttttgaagctcaatttctgccaattgctcagtaagggactccagctcttcttggagagactgggtcgcatctgttgccaattctgacttcaaagcttctaagagttcctgaatttctttcagttgctcttggctttgttggtaggccaattgggcccgctgttgctctagacgcgcttgctcaccctggctttgaatagaggctaggtattcttgcgcctgcttgagcaaattgtccttggtttctacctcctgctcagcttctctcaaacgagcatccagagcttgcatttcctgcttcaaactatccaattctggtttgacaaagaccgtattttgggaacgattggcaccaccggcatacgatcctccggtccgcaattcggtcccatccaaggtcaccatccgaacttgataattgactgtacgagccgcctcacgcgcatgctccgtcgtgtcaaagatggccgttactccaagcaagttttgaaaaatctgttcaaaacgatgctcataggtcactaagtcactcgcaattcctaaaaatcctgcactggtttgaatcagctccagattcctcggagaaagttgacgagctttaatcgtcgtgagcggaaggaaagttgcccgtcccaagcgattgcgtttcaagaaatcaattgctcgagttgcggccttttcatcctcgacaatgatctgttggctgctagcccccagagcaatttcaagcgctgtctggtagtcttttgagaaactcaaattctcactaacagctccacagatgcctcctaaccgttctgcttcttgcaaaacgctcttgacaccagcatagaagttactatggttcttctgaatggcttccaagctattgatccgcgcccgcttattcttgctctcatccatcaagtcaaacatggcctcttgagcctcttggtaggcagctttggcctgctccacttttaccaattgctcttggtattctgctagtaaacctttgaccgtcgcttgtgcctgatccaactcttccaattgtcggacttctttttccttggcagtttcaaagtttgtttgtgccttggtcaaatcctcttgacgatggcttgattcttgcaatagtgcttggatccggctctcaatagctgtccgctcattcgatttttcagcctccgtctgcaagagcgcgacatactgctcgcgtagatgctcaatgacttgttccggatcttcttcgtagttggctaattctttttccaactcttcttgttgctgccggttctctgtcagtctttgttgaagcacagttagcgtctcttgtttttgagccagctcttgtttcgcttcttccagacgggccaaaacagcatccagccgctcaagattttccctgcgactatgggctgcttgactcgattgcaacttagctacttcgatttgcttttctaaatcactgatcaaacgagtgacctcaagcaagctggcctggtcctcagctaagctctcatccaactgatgacgggctttcttgatgcgtacattctcttcttctaagacctgacgacgttggtaataagaagccaactgttcttgaatagccttttcttcttgatcagctttttcgtagagctcttttgtcagatcgacttgagcaactaaaacatccagcaagagaacctgccgttcttggtctaattccaagaaacggcgagctacagtcgcttgcttttcaagaggttggatctgtccttctaattcatagaggatgtcttccagacggtccaaattctcctgggtttggttgagtttggtctccgtttccttacgccgcgtcttaaatttcaagacaccggcagcttcttcaaagattgcccggcgttcttccggtttggagttaaagatctcctctacccgtccttgggagataatagagaaggaatcacgtcccaatcccgtatccatgaacaaatcatgcacatctctgagacgtactttcttgccgtcgatcttgtactcgctgtctccagaacgataaatatgccgttcgacacgaatttctttacctgcctgctggataaaaccatcctggttatctaagacaactgtgacacaggcataattcagcggttttcgcgattctgtccctgcaaagatgacatcgggcattttgcccccacgtagactcttgacactagattctcccagagcccagcgcaagctctctgtgatatttgattttccagatccattaggccctacaacggcagtgactcctttgtcaaacacgacttttgtcttatccgcaaaggatttaaagccttggatttcaatctcttttagatacatggggaatcattcctcgtttcaactgcattgcgggctgcttcttgctccgctaatttcttggaacgaccatgaccatttcccatcgtttgaccgttcacgaacacttctacttcaaactctttggcatgagctggaccggactcgctaaccacttggtattggatctccacatctccgtgaacctgtaacagttcttgcaggcgggtcttgtagtcaatgacttgagaaaattgacccgtttcaacctttggaatcatgacctgatagatgaagcgtttgactgcttccactccttgatctagtaaaagagcacctaaaaaggcttcaaataaatcgccaagaattgtatcgcggtcccgaccaccagatttttcttcacctttgcctagtttgatataacgatcaaattggcaatcccgagaaaaaccagccagactttcttcacgaacaatcatagaacggaatttagacaaatctccctcaggtctgttggggtgttccttatacaaatattcggaaataactaattgcagaacagcgtctcctaaaaattccaaacgttcgttatgtgaaatttttaagaggcggtgctcattggcataagaggtgtgcgtaaaagcggtatctaataaactgctatctgaaaaaacgatctgaaaccgttccgataacagggtttgtaatttctccatgggaagcctactttctaataaatttatactcttaagtataccaaaaaagaagcacgaacgcacttcttttcctagttctagggcctgaattctccaattttaatcaggattttcttctgttggattttcggacttattgggaatcacttttaagagataataggtgataaaaatcgtcaaagcaactagagcaagcttcacccaaataatcggggccagatagatcgaaatccccatcagaatgtagatctgaagaaggatccatttcttccgttctttggcaatcgatttggtctctcggtaatccgctacataggtttgataaagcttggtttggtagagccaagtttcaaagcgtttggaacttttagcaaagcaggccatcgatagcaataaaaagggagtcgtcggtaaaatcggcaaaggaatcccaataattcctaatcccaaagacacaaaaccaaccgtaagataaacaaggcgcatttacttctcctttgtatgattcttttttcgtaatcactctactgcgttcacatctgacattcgaagtaccatcttagaagggtctgacattccatcgacaatcttcatttgctcctcgttcaatggtaataatatcatagttgctgtatgagagggtaattcaccactatctttgatgaaataacttaccttttgattatcaaaaatagtctttccatcataagaccaagaaattgaaaaattcaaatcttttttgatatctacatctgtcttattaaccaacatgagagctgctcttccttcagaaatagctcccgtgaagtagagcgccatattaccttcacttccgagttcaggatgttccttgaccaatttttttcctaactcaattagctcagatgttttaccttcatactgaggtgctactacaaatttcaaacctttttcttctttagaagactctgatacttttgtttcctttgtcgtttgattggaagttgactctttcgtatcttgcttagactgactacaagctgttaaagcaaccaaaccagccagtaataacatcatttttttcatttattatctctcctctactttcgtgactctcactcagaattcgttctttcctatcatacacgaattttggctaaagagcaaattcattactagatgtagatttcctaaaataggcatataaaaaaccacccacgggtggttttccatcttatatcttcgtcaaaggggtcgcggtatctggcgaggtatctaacacctcaaaatcatggccaacagctagatctgctcgagccagttgattctccatggtcatatgggccaattctttgatattgttctcttttgacaaatgtcccagataaatctttttggtgcgatttcccaaggttcggatcatggcatctgcaccatcttcgttagaaaggtggcctaggtctgacaagatccgctgcttcaagcgccaagcgtaagaacctgctcgaaggatctctacatcgtggttggactcaatcagatagccatccgcatctgcgacgatgcctgccaagcgatcactcacatagcccgtatccgtcagcatgacgaagctcttgccatccttcataaagcgataaaattgaggggctgcagcatcgtgactgacaccaaaactttcgatatcgatatcgccaaatgtcttggtcttccccatttcaaagatgtgcttttgagcatcatcgacctttcctagatacttggtgccttccattgccttccaagttgcttcattagcatatagatccatgccatatttccgcgctaaaacacccacaccatgaatatgatctgagtgttcgtgcgtaatcaaaatggcatctaagtcttctggtttgcgatcaatttcagccaatagtcccgtaatctttttccctgatagccctgcatcaataagcagttttttctttggtgtctcaaggtagaaagaattcccactagaacctgaagctaaaatactatacttaaatcccttttctgtcattgactccttattcttcctcttctgtatcccagtcgtctttaatagcatctttgtcatacggcaagacaatggtaaaggtagatcccttgccatattcactcttggcccaaataaagcctttgtgttgtttaatgatctccttagcaatggctaagcccagaccagtcccaccttgggcccggctacgcgccttatccactcggtaaaagcgatcaaaaatgcgtggcaagtctttcttgggaatccccaaaccctcatctgagatggaaataatcaactgggcatctgttgttctcatccctaccttgatctttccaccatcaggtgagtacttgatggcattgttcaagatattatcgatcacctgggtcattttatccgtatcaatttccacccagattggagtgatcgggtattctcggattagttcatacttcttggtatcttcttgcgattgactcttgatcttatcaaagcggttcaaaataaaggtgataaaggccgtaaagttggtcaactcgatgtccaactgactggtttcattatcgattcgtgacaagctcaatagatctgtgaccatgcgcatcatgcggttggtttcattgagtgaaaccttgacaaaatctggtgctaccggctctgacaaagcgccatcgtctagggcttccagataggatttcacactggtcaaaggtgtccgtaattcatgactcacattggagacaaagaggcgacgttcccgctcttccttgtcctgctctgtcgtatcgtgcaagacagctaccagaccagagataaaacctgactcgcgacgaatcaaggcaaagcgcacacgaagacttatgtattctccattttcatcctgggaatcaatggtcaactctggtacttcagtaatcaagcttcgcagatcatagtcatccccaagcgaaagcaaatccagaatactggtattgagcacctcatctggattaacattcaattgcttggctgccatttcattgaccatgatgatctgaccacgtctgttggtcgcaagcaccccatctgtcatgtaagaaaggatactggtcaaacgcttggtttcttgttccaagttttcatgcgtcaggcgaataacctcagacagatcattaatgctattggtcatatctgtcagctctggacttccttgcatgtcgaccacttcggaatagtcccctgcaatcagatctttaattttggagtttaattgtctgagcttgatattgtccctacggttttctagcaaaagcaaggctaccacaatgataaacccaaccgtaatcagaacaaagacaaagttcgacgacattacaaattgttttagttgatcaatcattgtttctcatataatatccaacaccacggcgagtcaagatatattctggacgtcccggtgtgtcctcgattttttcacgcaaacgacgaaccgtcacgtccactgtccgaacatcaccaaagtaatcatagccccacaccgtctcaagaaggtgctcacgggtcatcacttgaccaacatgggtcgcaaggtgatagagcaattcaaattcgcgatgggtcaagtccaattctttgtttcctttttgaaccaagaaagcatctggaagaatgtgaagatcgccaattacaatctccgtatcggcatcattttcaagctgaggatcagccgcaaactctgaacgacgcaacaaggctttcacacgcgcttgcaattcccgattagagaagggtttggtcacatagtcatctgctccaatttcaagcccgatgaccttatcaaattccgtatccttagcggataggacaatgatcggcacattgctggtctttcgaatcgtacgcgccacttccaaaccatcaatctctggcaacatcaaatctagaataataacatctggattttcagccgcaaagacttccaatgcttcccggccatcaaaggctgtcaagacttcatagccctcttttgccatgttaaatttgataatatctgaaattggtttttcatcatcaactactaatatttttttcatcttacatacctgtttctaatgctacttttccttatcaatctctatcttctaattatatcaaacttatgaagaaatgtggagtctcaattgctggactttccaataagaaagggtaaaaaagaccgagaagttaaaatctcagtctcagaaaaaacgaatgatatgtagaagataaaatcacttaagagattctaaaaaaagttaatttcctacttgctagaatgaatgaatcatttattaaaaactttccgtcgtgagaaaaatgagagtgggacagaaatcggtaattcgttagaattcgatttcgtcttcccacctccgcacagttgagtagggctgtaaaagctgatgaaatcagcgtagtagagcccactcaaccactgcgtcttgctcgataatccaaagataattgagagactagaacttttgtcccactctcactcgggagttttggaacttcatagaagttcgctgacgttcttactcacctaaggaaagttttttagattgttttatcctcaatctttttatttttttcattatttctcaacacgtgatttgttggcgatatcagctaggattgctgctacaaactcatcatgtttaaacattaaaacggtatctactttcagaggagatatcgtttttcttcttcggataaagatacaaaaatttcttcctttctctatcttttaaattaattgattcttcagagaaagactgtaaaatttttgatataatatgtaggatggactgatggatatttaaaagataatgttcaaaagaatcacaggtaagaattaaaaacatatcagtttggacagaagtctctctaccatcatccatgcagaaacaaaattatttgaaataaaaggaataaccaatgtccggaaactattcaacacgtgaattccgcgagaaactatatgatgaccttcatgttcgattaagagatacagtgattttgatgtgttcgatttttattgcctctataggtctaaatatgaattcaacagctgtcattattggagccatgctgatttcccctcttatgacaccgattattggactggggtttggtttagctatttttgatacgcgtttaatcaagcaatctctaggggttttatttactcaagtattggtcagtttgcttgtctcgactctatatttctggatttctcccttatcttatgcaagtagcgaattgattgcacgaacctctccaaccatttgggatgttctcattgctattgcgggtgggatagcaggtgtcattggttcaagaaaaaaagaagcaaacaatatcgtgccaggagtagccattgcaacagctctgatgccacctatctgcactgcaggctatggtttagctaatggaaatgtacgatttttatttggggctctctatcttttcttgatcaattgtgtctttatcatgctaatcaatattgttggaacaagaattatgatgagacaatctcccttaagttcatttaaagagctaaacatgaaaatgagaattgggttgatatccttgattgtattattggttcttccagccagctattcagcagtcactctgacgatggatcaagcacgaaaagaagggatcaaacagtttgtaggaaaagagttcgccaatcatacgatcattaatcaagtctacaagtcaagtagcaatgaattggtcttgacggttgttggagatccgatttcagaagaagaattagaaaccattcgccaaaaacaagactcttacggtattcaatctgttcaattgaaagtcaatcaagtccataattcgacaaaattagatagtgagacgaccaaggaattttacgaaaatattgacaagtatatcgatcaaaaactctctgaaaaagattcacaaaacgatctcgtaaaagaaaatgaagcagacaaggactgaggatagtcaacttatctaactcatggaagcaaatcttgggaggatatcctatatccaaaagttaatggatagaaaggattgttgatgaggatactatttgtggtggtttgaccgatcactactagctcaggttaaatagaaaaagcaacaactgaaatagttgttgctttttcttactaaaaaatatttctcagactgtgatcgttttatttctcaacacgagatttatttgcaatatctgcaagaatcaattctacaaatgcatctaccggcatggtttctgtttctttttgaccataacgacgtacgtttacagccttgtcttccatttccttgtcaccaacgatcaattgataaggaattttttgagtttgtgaagcacggatcttgaactgcattttttcattgcgttcatccacatcggcacgaacaccacggtcacggagtttcttagctacttcccaagcgtagtccacgtgtttttcgttcgaaactgggataagagttacttggtgaggtgcaagccatgttggaaaggcacccttgtagttttcaatcaagatcgcagtaaagcgttccatcgttgagataaccccacggtggatcatgactggacggtgttcttccccgtctgctccgatgtaatgaagatcaaagcgttctggaagcaagaagtccaattgaatggtagatagggtttcttctttaccaagagctgttttcacttggatatccaattttggtccgtagaaggcagcttccccttctgcttcatagtactcaacacccatatcatcaacagcggctttcaacatgcgttgagcattttcccacatctcgtcgttatcaaagtatttgtgtttgtcttcaggatcacggtaagacaagcggaaacggtaatctgtcaagttaaagtcttcatacacatcgatgatcaattgaaggatcttcttgaattcttcctcgatttgttctggagccacaaacgtatgaccatcattcagagacatttcacgcacacgttgcaaaccagtcagagcaccagatttttcataacggtgcatcatcccaatttcagcgatacggattggcaattcacggtaagaatgcacatggtgtttgtagacttcaatgtggtgagggcagttcattggacgaagaacaaactcttctccatctcccatatccattggtgggaacatgtcttcacggtagtgatcccagtgacctgaagttttataaagttctacagaagcaattggtggagtgtagacgtgttggtagcctgctgcaacttctttatcaacgatgtagcgttccaactcacgacggatggtcgcaccatttggcaaccagaatggaagaccttgaccaacttcttgagaaatcatgaacaaatcaagctctttcccaagtttacggtggtcacgttccttagcttcttcacgcatttgaaggaagttcttcaagtctttcttgtcaaaccaagcggtaccatagatccgttgcatcatcgcattatcgctattaccacgccagtaagcaccagcaacgttaagaaggtggaagatttggatgcgaccagttgatgggacgtgtgggccacggcaaaggtcaacgtattcaccttgacggtagatcgttaatccaccttcgtcttctgagtgttcttcaatcaattctaatttgtatggatcatttttgaagatttcacgcgcttggtctttggtcacttcttcacgaatagatgggaagttttctttcacgattttcttcatttcttcttcgatacggggaaggtcttcgttagagatttgacccgcttggttgtctgtatcgtagtagaaaccatcttcgatcgctggaccaacacccaagtgaatgtctgggaagaggcgacgagcagcttgggcaaataagtgagccgctgagtgacgcaagattggaagagcatcttcgtgatcaggtgtcacgatttcaatgcttccatcttcggtgatggcacgagttgtgtcaatcaatttgccgttgaatttaccagcaagagcttttttagccaaagaattgctgatagattgggcaatttcaaaagtagtaacgccagaatcgaattcacgaacagcgccatctgggaaagtaatcttaatcatgattttctccttataaagtttttagtagctaaatgggtgggaggtgtctttgaacattggaatcgtcactccttttgattttcttcattaagaaatcaaaaaagcgacctcctcgaaaggacgtcgcaacgtggttccaccttcatttatgttcctcaaaaaagagggacacctctgattggctctaacgtagccaccgttttatgtttgcataaaagaatcacgagtagtcccaaacctatcctctacgcgatttacagccccacgcgctctctatcagatttcctagatttgatatgtctctgtcagttattatagcacgattgaaaaattttgcaagaaaaagtttcgttttcaatcaaagaaatgcgtgattttacggattttcttcacttgtttgaccgaagccttcatcatcttcacagatccattgaccggaagagcaatcaccttggtcgggattttcacaatggtcttagacatccgcttaacccgactttgctcaggattcaaatcatttgaaaagtctttcgagatgattttatccaggtaaaattcgtagacccgacggccaaaagttgctgcagaaatatcatcaatcttttctgcccacttggtctcatcgattgcaggcatctcatcaatcgcttcaaaaatcgcttgtgccagatcgctctcctcataaaagagctttccaaacataggatcatcaatcacatgatcgagataaggattgccatgagcgatgatcggggtaccactcgcaatactctctaaataggtcaacccttgcgtctcactcgttgaagctgaaataaagaagtcagccgtcttatagtagagagctgtctcatttggctggatcatccctgtaaagacaatagcatctgatacgccaagtttcgccgcttgttttttcaaatcatccaaataaggaccatctccagccacgatcaacttaacttttggattgaccttgaggacatccggaagggccgcaataacagcctgaatattcttttcataagaaacccgcgaaaggctcaataagagcgtttcatcttctgcgacttcatatttttcacgaagagcagctgtctctatcggagtgatttctggtcggtcaaacttagccaaatcaatccctgtcggaataatacgtttttctgccttgaccttgtatttttggagcaagtcatagacgatctcacttggacagatcactccatccagatcattcatataacttctcacaatgtatttgaccatacttggtcgaatgaccatacctctcgcaatatagcggacatagtcctcatactgggtatgataggtatgaatgactggaatccgcaactcacgtccaatccacactcccaaaaggcccagtgaaaactcagtctgggtatggataatatccagctggtattgcttggcaatggcaagcgcctttgagaatccacggtaagcaacgcggcggtccttaaaggcgaagaaaggcacacttggaatccgaatgatctgccaatcttcatagcggttcacatctttatccgttgtcgtaaagataaagaccgtgtgacccaatttttctaattctgttttgagcgtccgaatactggtcgccactcccgaaacttgcgggaaataggtatctgtaaataaccctacacgcatcttacatctccaaaactgtttgataggcttcgaccaattgatgagccactaagtcgatcgaacgactttcagcaaccttgtagcccgcctcccgcttgtctacttgtccgttcaagaccttgttcaaggaatccacaaattcgtctacattatggcacaattcagatgacgtctcgtcgatccagccattgtatactggaatatcccgcaagaccgtgtgctgatgactggccaaggcttccaaaacaacgattccttctgtttcttcataagatgggaagaagaaagcatctgaacccgtcatagccccttggaagaccgctcccttgaagtagccagggaattccacattactaggatgatccttttccacgatacgacgaatcttacgcggaatgatccatttgttgatagaacccagccaaataaagcgcacatccggcatgcgacgagccacttctacgaaatcttcaattcctttacgtttaaaataaagccctgcacagatgacaaccttttgaccttcttggattttaaaatgcttgcgaaagacctcttcttttttcggatccttcttgtatttttccaaatcaatcccattagagaccgcgataatcggtgtagtcaccccataagactgaattaggtgtttggaatactcagatggcgtgatcacatagtctgccttttggtacatgtgagccaaatacttcccaaacaagggcgcaaaaaagttagacccgataaaggaattttcaaaatcctcacgggttgaatggccatgcatgatgactttctttccacgacgctttgctgcatggagcaaaaggaaactccgtgggccataggtattgatatgcaccacatcatagtcccctaaaatatctgtcgtatacggaatcccagccaaatcaagcgcatgcatttgatgctgcaaggcccgaccaattcctgatttttgtaatacggattttccttctaaatacagtaaaactttcatacctcctattataccgaaataaagagtgcccagcaagtttctacctgtttgtagtataaaaaagaagccagaacctatctgttctggcttcccagactagtagacacgtcttcccatatcgagactctagtctaccaatccttattttttcgtcgttccacgttggttgatcgtatgagacaaaagtacttcgcgttcttccaactcttctttgtgcatgatcttcgtcaacatgcgcatactgatcgcaccaaggtcatacaagggttgtccaattgttgatagatttggacgcgtatatcgggttacttgtgaatcatcactggtaataatttcgaaatcttctggtactttgataccgtgatcagacaaaccgttcaagagacctgcagccaattcatcacctgtcacaaaagcagctgttgcttttgacgcaatgattcgttctgccaagttgtaaccttcatcgtaacggtacttggattcaaacacaagcccttcgctatagctcaatttttttgctttcaaagcttccttatagcctgacaaacgaatttttccattgatatcgtccaccaatgggccgcttacaaaagcaattttcttgctgtgttttgccaactgtgtaacagcatcaacggttgcttgcttgtagtcgatattgacacttggtaattggtgttcaacatccactgtcccagcaaggacaactggtgtccgagagcgtgaaaattctgagcgaattttttcagtcaagtgataacccatgaaaatgatcccatccacttgttttgaaaagaggttgtttaccactgaaacttctttgtcatcgtcttcatcgctatttgcaagaacaatgttgtacttgtacatttctgcaatatcatcaatccccttagccaatgtagagaaataactattggtaatatttggaataacaacacctactgttgttgttttcttgctggcaagaccacgtgcaacggcgtttggacgatagtctaaacgttcgatcacttccagaactttttttcgtgtattttctttaacatttttatttccatttactacacgactaacggttgccattgaaacccctgcttcacgggcgacatcataaatcgttactgtatcgtctgtattcataagatttcctttcattgttgaaaatttcgttttcattctctaagtaatcttattttatcacttattgtaaacactttcaagcattttggcaaaattttgtaaactcttgcttttttgtggaaaatttgacaaaatagatccatagaaagaaggtagcattatgtctaaattagatcaaatcgtcgattttcttgaaactgaaaaaacagatgtcgctgttgtgtccgatcctgtcacgatcaattacttgactggattttacagtgatccccacgaacgtcaactctttttgttcgtttacacagaccacgaaccacttcttttcgttcctgcccttgaagtggaacgggcgactgcagttgtcgatttccaagtggttggctatgtagattctgaaaacccttgggaaaagattaaaggagctatcgcaaaaccaaatgccaaaaccgttgcacttgaatatgataacttgatccttacaaaatacaatggcttgcgcactgtctttgaaaaagcaacatttaccaacttgacaccacggattaaccggatgcgcttgatcaaatcagctgatgagatccaaaaaatgttagtggctggtcaatatgcagataaagctgtcaatatgggattcgacgccatctcactggataaaacagaaactgatatcgtagcagaaatcgacttcggtatcaaacgcttgggttatgaaatgagctttgaaaccatggtcttgactggaaataatgcagccaacccacacggaattcctggaagcaacaaagtcgaaaacgatgctctcttgctctttgaccttggctgtatggtgaatggttatgcgtcagatatgactcgtaccgttgctgttggaaaacctgatgatttcaaaaaagaaatctaccacttgactttagaagctcaacaagcagccattgacatgatcaaaccaggtgtaacagctcatgacgtagaccgtgctgcccggagcgtcatcgaaaaagctggttatggtgaatacttcaaccaccgcctcggacacggtatcggaatggacgtgcatgaatttccttctattatggaaggaaatgacatggtgcttgaagaaggaatgtgcttctcagtcgaaccaggaatctatattccaggtaaagtcggcgtccgtatcgaagattgtgggtacgtcacaaaagacggatttggactcttcacagaaaccagcaaagacttactttactttgactaatccttttgcaatcaactagaaaaaaatcaggtcactaaagtgtactgacccaaaaaaattagacaaatcatttaagaaaagaggctgggacaaaatgaactgcaccccaaaagttagacagaaaaaatctaacttttggggtgttttataatgaaattaacttatgaagataaagttcaggtctatgaacttagaaaacaagggcgaagcttcaaagagctttcaaatatatttgggataaaaattcccaatcttcagtacatgattaaattgatggatcgttacggtatagagtttgttaaaaaggggaggaatcgttattattctcctaaattaaaacgagaaatcattgataaagttctgattgaaggtcgttcacaaataagggtgtctctagattatgctcttccaagtgttggaatgttgcctaattggatagcacaatataagaaaaacgggtatactattgttgagaaaacaagagggagaccgcctaaaatgggacgtaaaccaaagaaaaaacctgaagagatgacagagttagaacgtcttcaagcagaaaatgagtacctgagagcggagaatgctattctaaaaaagttgagagaactccgattgagggacgaaaagaagcaagaagaaaaacagaaattgttcaaggattggtaacagagtttcctttagatattcttctaaacattatcaaacttgctcgttcagcctattattaccacttaaagcaactgaatcaagtagataaagatcaagctatcaaagtggaaatacaagccatttatgatgaacataagggaaattacggctatcgtagagttactcttgaattaaggaatcgtggttttgtagtgaatcataagaaggttcaacgtctgatgaaggtccttggtttaagtgcacgtattcgtcgtaaacggaagtattcttcataccaaggagagattggaaagaaagcagataaccttattcaacgccaatttgaagcatccaaaccaatggaaaagtgctacacagatgtgacagagtttgccattccggcgagcagtcaaaaactctacttatcaccagttttagatggctttaatagcgaaattatcgcctataatctttctacttcgcccaacttagcacaagtgaaattaatgttggaacaagccttcacagaggagcattataaaaatacaattctccatagtgaccagggctggcaataccaacacgattcttatcatcgattcctagagagtaagggaattcaagcatccatgtcacgtaagggtaatagtccagacaatggtatgatggagtccttctttggcattcttaagtctgagatgttttatggttatgagaagacgtttcactcacttaagcaattggaacaagctattgtagactatattgattactacaacaacaaacgcattaaggtaaaactaaaaggatttagtcctgtgcaatacagaactaaatcctttggataaattaattgtctaactttttggggtcagtacaaaagtcctagcctcttttcaatataatcaaaaaagatagtataagactttattgaaacgtgaatcttatagccttctttcaaaagaggtcatataacctctttgaaagaacttagaaataaaaaattatcttatttaaataagataacctctatgaactgcaaaaaagcacaccctatttgaacctcgtccctagaatcttccattgccatcatatgttcttccaatttcctgaaaaatcgatgaatcatccatagaacatctttaagcccttctttatgaatgaatgatgccttagtcagtttttcttgcatagaaattcatccatatcctccttacttcttctttaacaagatgcttcggaattcacaacttaatttttttattgaatagctcagtcactttctaatttttttctttttgtacaggaaaaacagctattatactataaataattgattgtaaatcaaccgattttagtttataatgcagatgaaaagtttaacaaatttctatttttataatggaaattttgattacatttaggagacctcatcatatgaaaaaattaacgaaattaggtatcgcatcgatttccgtatttgtattaaatacctatactcatacgattgtgaaagctgatgagaataggagttcagagacttctgtaacagtagagttatcaacaactgaagcaaatgcaccacagggagaacattctatcgtaacgaacaatggttcttcgagcgctgaggacaatgttccttctagtgatggagactatactctagctaccaccacttcggaaactactaggagtacagcgactcctccaaaaagtaatatcgtaaacgaagatggatatgtcaatattgagggacatcccgcagctttaacagatgatggtgaaagcgttgtctattcttatacagttgcgtttaaagggatgcattctagtgatcgtgtgcaaacagttcgcgatattagactccgcattccagacattccaggcgctaaagttgatttcacactgataggaacacgagatgccaatgaaaatcctgttcccgtcaatgtaccaatgaaagtcattcttcctgatgaaattgtttcggattctgacactgatcctactactacctttaattcagattcctcagttgttccaactgcagaagaattaagagcaggtaaaaaaccggcaattgtcaatatggatgcaaatgaaaatggttatcctggagaacacctttatccaggagacggaattgttcatttatatggaattagctctaaaacccttaaaagtactgcttttcgtgtagctatcacacttccattaaaagaggcaaagaaaatcaaatacttaccgattgatgcccgttttgcatggaaatgtagccaagaaggtgggatagccagttatgaagaaggctgtcagagtttagaagaatataaatctaatcaggtttattttgctgatgaggatggtaatctaagttatggtgggttaggtaatcctaccctagtggatgaaagttacgtacgggatggtcatctcatcaggtccgttgcaagtccaaatacctacattacacctaataatggggactggactaagattccaaatgacaccaatattgatcctaatactttctttaactatgtggaaatatttacattaaaatataatccatctgttacgtattatgcatctgaaacagaagatatggctgatcaagacgtttctgctttttaccaaggaaacgttctgatcgactatgtgatcaaaggatccaaccaatccatcaaacctacatatactgatactgcattgacttctatctatggattggatggtagacttaaaaactacaacacaacagaaaataatctcgaacgtccagactatattatttataatggacaaaaatatcttctagtagggatttcatcctcatctgcaccagagattggtcctatgaaagaggggacgcttcatgtagtatatgaatatgtgaaggaagcttctaatcctgttactcccgtaacaccaactccaacacccgtttcaccaatagtctctgaaccagttcaaccaaaccaaaaagaagttaaaaaagaaaatccgctctctcacgaaggaactgtagagcctcaaccatctcagaattctgttactaaatcagtaatggatttagaacaagtaggattgccaaaaaccggagattctagtagcaatgtattctttagcttattgggtgccttaacaggtttccttggattctccctcatcaaaaaaagaaagagtgaaagataatagaaaattctaagccgttcacctgtctggaagcttgcaaattctaataagaggttattttaaaccctcaaaagtctttccctctacttgttgatcgcaacagtctattttctctttaactttgctctctctagctttcctcaccacttattcaaaaagtgggcagaagctgtagactaatagaggctcaagttctgatctcagcaaaaaagatcgaagaaggttacacttcttcgatctttttcttatgaaacggattcgagattcattcttttctgcgtatcttccacgacgtcttttaaagtgatttgggccatttctttttccatagcagtctgaatgtcctcaagcttcccatctaaaacattgtggatattgtggccaatcgggcaggctggattcggattgtcatgaaaaccaaataattgacctgtcgaacctaagcattctaccgcttgatagatatccagcaggctgatctcatcggctgcttgtgcgagctcagctccgcctgtcccacgcgctacatggatcaatcctgctttcttcaactgagacaaggtctttcgaataataacagggttcacgccgacacttcctgccaaaaaatcactggttacttttgttttttctccttgtagagcaatcatgatcaagacatgagtcccaatggtaaagcgactcgaaatttgcataacttcactcctttctacccgtttttgaaggtagagtctattgaacaaccgtcaagagacgacttccgttattcctattatactcttttcagttgtaatgtcaacagttacactattgaaagaagtcctctaaccaagcatcgatttctcgatcatgaccttctctctgctcaatctcatgaagaagttcatgattgtgggtatgatgaatgccattgaccaaactttcgtaatacacttggtaataaggaagatggagatcttttgcgagttgcagttctttttggacatcataatccacccgtctaaaatctacatcttttagccccatttgatcaaattcaagaatagcatacatggcccgaaggtccttgcgaagattcttttccagaaagaaaggctgaccgatcgagccaggattgatgatcagttctccgcctgtcccgtaacggaaaaactgctggtgaatgtgtccgtagactgcaatatcacaagacgggtttgtcaccaagcgatcaaaatccttctggtcaccaatgtggatcaattcgcgaccccaattcttatcgggtaagtggtgggtaataccgatctttaaacctgcgatttctctatggacctgcatgggcatttcctgcatgacttcaatttcctggggtgtgatttcttccagaatatattgacactggcgcatgaggtagcgatgactgggtctggtctcatccaacatccccctcatagcccgccaaagactatcttcccagtttccaaggactttgaccgtaataggtaactcctctaacagctccaagagggcccgtctccctgttcctggcatcaaactatctcctaagagccaatattcatccaccttggcttttcgactatcctctaggacagcttccaatgctgtcgtatttccatgaatatctgaaagtaaagcaattttagtcatgatcttctccttctctccattataacaaagagaagaaaaacttccaccctaaggtgaaagttttatgaacattccatgctaccagaaatgaaaactcaggctagatagccctttttgtcaacatcagatgagggaggattgatactatcctcccgaagagttagtaattcgtctagagagtgggacagaaatcggtaattcgttagaattcgatttcgtcgtcccacctccgcacagttgagtagggctgtaaagctgatgtaatcagcgtagtagagcccactcaaccgctgcgtcttgctcgacaatccaaaaataattgagaggctaggacttttgtcccactctcgttacacgaattgaacacgccctaaatgctgtgtgaaaaagataaattctcttgtgagcatcgctcactgcaagaatttcctattttcaccttgcattttacgggctttgcatcttagtctactgatttgagggcttcgagcatgtctacttttcggagataatggtcaacataaattcctaacaggatcaagagaaggatcattcctccgacagggaagaggaaaacgccaagtcccactttagggtaaaaaagaatggcatctggtgcaatcatggcaatgaggaattgatgaagataataaccacccactaatcccatgaggatccctatgatagacaataagatggtttcacggtaaatataaagcgtcacctccttattatggaatcctaagaccttaatggtcgataattcccggattcgctctgccacattgatattggttaaattatacaagatcacgatggctagtaagatcgatacaactactagaatcatcatagtggtgtccaaagatttggcaactgaattaaagagggaaatcatcgaagcgttctgactaaccgccttcacagctgcaagatccatcatgtcccgactgacagtctgcacttttcgtgtagaaggacttctcaactgcaccaaatagctatttgctgaagtccgctttccgtagattttttggtaacttgcctgatccatatagacaaaatggccgacataattttcagtgatccctgctaccttaaaagagtggccatctaaggtcagtcgatcaccgactgtaacccgggctaattgcgctagcttactactgataatgacccctttcttgagagacaaggactcaccttgcttgatagaacgcaggcttacaaagggagaaaaatctgtacggtccgttaccatcatcgtaatggtctgcttgttgcgtccaccctttaaagatgcttcaatgaccttactatagatcggtcgataatccttgatatctgatttttccagacgattgcttagttccttgctttcttggcttgatgcattgggtttttgggctacaatcaactcataagataggatctcttgaaattggcgtttggaaacacctcttacagaagattgaattcctagccctgcaaagaggagagcaacagaacctgccactccaaaaatggtcatcagcatccgttgtttgtaacgaaagagattacgagcagtgactttgtgggtgaaactcagacgcttccaaataaaatggagacgctccaggaaaatcttcgaaccagataccggtggtttaggaagcaatagaagattggcttcttcttttaattccttgcgagaaacccagtaagccggaagcacactcgcaacgaaagacagtccgagcgcaatcagagtcatatctccataaaaatactctctgctctctccaatcaccatcccttgcgtgataatgttggaaatgatccccgataggaaataatggcccagcaaggttcctagaagggtaccgatcgtccctgcaaagaatccatagagaacaaatttgagaatgatgtccctggtacgatagcccagcgccttaaaaatacctgcattggttcgctcttcatcgacaaagcgggtcatcgtggtaaaggtcaccatggctgctaccagataaagaacgaccggaaaaatatttccaacagcagagatactactactggcattgctatacatcaagtaaccttgtccacctggcatggtcttgcggtcatagacatgataagttggaatttccagctgatctcgctccctttgggcttttttcagctcctcctctctttttgcaagctccgattcacctgtagcccagtccttctttttctgatccagttgttctttggcttgatggatcttttcttgactggctactcgctctttaactggcagaaaggaagctaatttcttgaactgcgcctcctgcaagtctaattgtttttgagcctgatcgatctgactcttggctgactggagtgtttccttggcacgactgagttctttctggcctttttgaatctggccatccgcctcctgcttgagtctttgatagcgagcctttccattgcctttcaaaagtatttctaactcttcttgatgagcttcgagccgtttttggtagacttgcgaaaaagaatccaaagatcgcagatcatcaaactggatccgcgccatcgcgggaagtttggtggtgaaaacttcttttgaaaccagagcataggcatccagattcccactgccactcatggcagtgcctaaattcttttgagaccacatctcagaggattgtacaaagccaacaatggtgaattgctttcgctttaaactagagcgagttccagacttttcttcaagtgtgagggtatcccctatctgatagcgatcctcccaaaaacttgctagggccagttccccttctttttggggcaggcgccccttggtcacacgaaaagaagaaagtctttttggggcagaaaaaagtcgaattgcctctcctgtccctttcactgtcaaatccagcagtgaaccaaattcgacacgcgcccctttgactcctataagctccttttggtctacctggtctaatcccaagtcccccatgacagcaagatctagcatcttttgttgctgaataaactggttagccgttcggtgcatatttggagtagtcacctttaggcctaccaaggccaagcttcccaacaacatcaaggttaagatggagagaaagcgtccttttgaatgtgtaaaagaaccaaataaatccttccaatagacttttcgtttcatgctaccacctcttctaatactctagtgtagcaatatcttgaggaagctcattgatttctaccgacttgaccttggcatcatgcatgcgaatcacacggtctgcaatcggagctagagcagcattatgggttacgatgatgaccgtcgctcctttttttcgagacatatcctgtaaaatccccaatacttgcttacctgtctggtaatccaaggctcccgtcggctcatcacaaaggaggatttttggatttttcgccactgcccgagcgatcgccacccgttgttgttctccgcctgacaattgggcaggaaaattatcaagacgattgccaagtcctacttctttcaaaacagcttccggatctagagcatcagaaacaatttctgaagccaactcaacattctccttagctgtcaaattagggaccaaattataaaattgaaagacaaaaccaacatcatctcgtcgataattggttcgttgatgggcattgagctttgcaatatccaccccatcaatcagaacctgaccctcgtcattggtgtccatccctcctaagatattgagaaccgttgatttcccagctcctgaagcccctaaaataatgaccaactcgcctttttcaatctcaaaggaaacatcccggttagcgaaaatttctgtctctccactcgtatagcgcttgtaacaatgctgcatttcgatgtagggcattttctctttcctccctctacttcctaactatattataatcctttttcgatagattacaatggaatcgaggtagtagaaaacagggtaaccccaaattatcatgaactattataaattttatgctataattagagacaaatttgatttattcttagaaagaaggctcatcgtgagtttacaacagtttgaaaggaaatcacttcaagaaatcaaccaatctattgacgtgccaaaagggatccctttttggaagaccctcctgctcttttcaggaccaggaagtctagtagctgtcggctatatggatccgggaaactggattactagtgtcgtcggaggggcccaataccgttacctcctcttatctgtggttcttctctcgtctttaatcgccatgcagttgcaacaaatggctggtaaactagggattgtccaccgtaaggatcttgcccaaacaaccgcccatcatttgcccaaatggcttcgctataccctttggattgtgattgagcttgccttgatggcgacagatttagcggaagtcatcggctcagggattgcccttcacctcctctttggttggcctctgctcttttccattctgattactatctttgatgtcttcctattactggggctcatgcatctaggatttcgaaagatcgaggccatcgtttcaaccttgatcctcacgatcctagcaattttcggctatctagttttcctatcgaaaccagatatcggaggaatcttcgctggcttcctccctcaaaaagaagtgttgggaatcggtcttccaaaaggaaatgaagccttaaccttggcacttggaatcattggtgcaaccgtgatgccccacaacctctatctccactcttccatttcgcaaacgcgaaaagtcgattataaggatccagcagatatcaaacgggcagtgcgctttatgacctgggattcaaatattgaattgagtttggctttcgttgtcaactccctcctcttgatccttggagcggctctcttttttggtcatggagataaaatcggtgctttctctagcatgtacaatgccctcaaggacaaccatattgccggtgctatcgctagtcccttcttatccaccctctttgccatcgcattgttagccagtggtcaaaattcaaccattactgggaccttaaccggtcaaatcgttatggaaggtttcttacgattccgcttaccacaatgggtcgttcgtctcatgactcggatcattgcccttcttcctgtcatcgtcgttgcaattttattcggtgaccaagaacatgtcctcgatgaccttctggtttattctcaagtcttcctatcagcggctcttcctttttctatcttccctttggtttattttacctccaacaaagaaatcatgggagagcatgtcaatgcgaagtggaatactttcttaggctacctcgttgccataatcttaactatcttaaatttcaatttaattgtgacaacttttatcaaataaagaaaccagcactttttcgtgctggttttcttttaaaatcttgcttatgatttccatcaactcaccattttacccaaaatttcctgattaaattttaaagagggaatatttttaaagatccatttttatgaaaaaattttccatcgccctcatcgcccgtctttcttaactttgtgaaaattgaagccattttttatttttagaaaaatcgattgagttgtctttttttttttttttagagtataatgcttattgttggttaggtaaagttattttaacagtaaaatattttacttaacaaattaatgttaatatgttcaaatcgaaatagaaggaatcttatggcaagacaaagacaaacaacaacaaagattgacttaagaaatgcactttcacagctactattacagcaaaattttgaaagcatcactattcgtgaattgacagaaaaagctgggattaatcgaggtaccttctacttgcactatgtcgacaaatacgatatgtttgaacaaatgaaaacagaattagtgcaagaattggatagtctttttgttgaaggaagcccagtaaaagttaattttctcaatgttttgacaaggattaaagaaaattacgattttatctatgctctttcacaatctagttacttggacttccgtaaatttgttagaggctttacacttcatgcattagatgatacccctaatgctaaggagcacatcattgcagatttccaggttccttacaagtatggtctagaaattttcatagctacgattgaatctgttattgtgacctggctagaatcgggtgcaaaagaagatccaattgaaatcgcaactattattctcagcatttctgatttcacgagctggaactaagtctcctgaaccttccccatcatgtactgaccccaaaagttagagttattgtatctaacttttgagtcacagttcataatggcgggaaggtttttcgtttacagcaaaaaactggataatttttctttcaaactctttatccagctcctaatttcttattttttctttgccaacatagtcgcaaatcggagttgaatccgattgccattctcatctcgacgatggaggtggccaggattttcattgtatttgaccaattcccaatccttgtaatactccgctaattctccttctttaaaggtgaacgagaaaggcatctggcagggataatcttctgtatccatggcacagacaatgagattgtagccacctggattggtatgctcttgcatattgcggatgatcgccgggattcgatcagcctctaaaaacatgaggaccacagttgacacgatgaaatcatagttttgggtgagtgcagcagtattgatatcataaaggcccactggcatctctagatcttcctcagcgacaatactttgtaagatctcaagagctagttcattttgatccacagctgttacgtcaaagccatattgggccaaaaagagagcatttcgtccttgcccgcatcctagatccagtgcctttccagctgggacaattcccactgcttctagcacttctgaatggacaggattggtgttgtattttttggggaaatagtcttttggctcacagtaaaattctaggtaccactccacatcgtcagtcgctgcttccacacggtgccaggcctggggctcggccatgggggtttctgctcctgcttcaaagaggtggctcgcgatttcttccccctcttcggtcaattcaataaatcttaactgaccttttaaaactgtaatcttcccccaggttcccaccttggtattgtgctttctttgaagagcttctggcatggtatccttggtccagataggcatgcgcttgtaagcgatcaatttttgtgtcatgctgcttctccttttttctttcagtacccttatcatacataaaaaagaccctttttacaagttggaaaaagaggctccaccctctagcggaacctccttgttaggatctcatcatcctgtttatttttttgattttttataaaagaatccagctaaactaaatccacaaacagccaatactccaagaagtactgagaagaccacacttgaatcttgagttttactagcatttttagaggtgtctccgagagcttcctgacaagtttctggcttcttgtctgaaccacctttttcagcagcagccattaagttcgctttattatagccatcatagacaaagtcagcttccaagcccttttcttcacggatcttatcttccatttccttttcagtagccttgatttgtttgaagattacatccgcacggtccatggattccttggtgacttcaccttgaagggctttggcttgctcatctgtgaggccactgtatttttgatccaaagcagcttgttccttgatccagccagcttccatttctttccatttatcttggatacttgtgccaaagaggtctggatatttcatgaccatttggtcgatatgccaaacagcccaataccatgaagttggatcatacttagcagagcggactttaaaggcaccgtaggtgtcattgactaagccatagaatggaacatatggggtgttgcgactttgagcaagacccaaccaaacgattccaccaaatggacttggtaagtctttcttgatttgatagacatgggcatcaatgacgttttcattccctaaagcatacttgtatttcttggtatcgacttttttgcctggttcggccaagtcatctgcagtaaattgtttgaggtgttcgaaacggttccgttgttctgcgaaaacatcttctagactatactttttagaaggatctgttggtttacgaagcagatcaaagtgttgatcatcatatttgacatccgcttttggatccatcagggtaatccctgcataagtccgtgagcggttgcgttcggtgtattcgtccggaccataagagtccgcaatatggaacttgccatccttatccgtcttgtaatggtcggctttcttagctactgcttctacatcttttgaagcaatcacattgtccttgtccttgagatccacatgtcccagatagtaggtattggcaaaaatagcatagcggtcttgggggaatttaatggccacatattggtgacctgagaggatttccatgtaccaaagctcatttttatctgctacgacgataatatttccttcggcagaacctttttcatccaaggtcttggcaacaatttcgatcccttctcgtgctgttttagcacgaggcaagaccaagtcgatcatggaagcttctggtaggccatctttgaccaaagggtcggctttcaatatcttatcatgaggagtcgctgatactgtcgctgtcatcgacacgcccacttcattaaaaccgtgagctccaaagttaccattgctaccatcgccacgcgccgcatcataggtcgctgtgtacttcatttcatgagtcaaatgtggataggtaaaaccattagactcatcttcgatcttatccccttccttatagtccttagctggaactacaacaaagttttgattgtggcgcccgccatctggtgcatagggataatcctctgtacgaccatacagcatggagccatccgttgttaagtcctttcccacaatgaaggcggaacaagcttgtgcgacctgcacgggcaatagggcgatcaccatcagcccaaacagtagtttgaataggattttcttcatagtctttctccttattgactacaaaagaagcttaaaaaacttctaagccagtgaaaaacaactataccaacaccttgattttagtatataatacaagcactttttttgcaagcgattacaagtgaaaactataaaaaagcagttctgaaacaagtttcaaaactgctttttctttaacgtgtattgtattgtttcatgacccgtgcgatgtcccggttttgttcccgacgtttgatggattcacgcttgtcataatcatgtttccctttagcgagccctaaaagtaatttggcatagccatccttgagatagaccttcaaaggcaccagggtcattccggtccctttggtgtcttggtccagcttttggatttgctttttatgaagaaggagcttgcgacgacgatctggatcttggttccagatattgccttcctcataaggagcaatgtggacattgctaagccaaacttcgccatttttaacttgcgcaaagccatcttttaagttaatgcgtgctgcacggacacttttgatctctgtccccgtcagcaccattcctgcttcaatcgtatccacgatggtgtagtcatgtctcgcctttttattttgcgcgactacctttccttcgccctttgccatgtttggctcctttctttgctacttccttgtaaaatggtttcttcccttttttctttttggatttagaggaagaatctttccgcttgtcattttttctagcggttgatcccttagaaacttttttgtccttgcgtctgcgatccctgcgattaccatctcggtcacgccctttagccttaagacctttttcgacgacatcccattcacttggaatataagagaaatcaatctctcctgttatcttgtcggctctttctaccttgattcggatctgctgaccgacacggaaggtcactcctgatttttctccgcgaagggttagatctctttcgttaaaatggtagaattcaggaagattggtaatatggatcaagccttcaaccgtatttggcaactcaacaaagaggccaaattttaccacactggaaaccacagcatcgtactcttccccaacaaagtcttccatgtattcagccttcttcatggcttctactttgcgctccgcatcaatagctcggcgttcccgactagaggattggctggcaatgtctggaaggacttgttcaaagtgctctgccacttcttgggattttccgtatttgcgcaccattcgatgaaccatcaggtccggataccgacggatgggactagtaaagtgggtataaaactcagcagcaagcccatagtggccatggttgtgctctgagtaacgggcctgttgcatcgagcgcaacaacatcatcgagagaacgtctgcatacggttctccttcgaccttgcgcataatttcttgcagggcttcttggctcatctcactagccgttccgtagatctggatcccaaagctagaagcataatcgataaacttctgtactttttctgctttcggatcttcgtggatccggtagatgaacggcagcttcagtcgcgtaaagtgttccgctaccgtttcattggcaatcaacataaaggattcaatcatccgctcggcaatccctctttgacgcaaaacgatatcaactggttttccttctttattgaccaagattttagcctcattggtatcaaaattgagggctcctcggcgaatccgcataccttctagaataccgtgtaaggtagccatttgatgaatacttgggacaattttcttaaaggtttgagccttttcttcgtcgcctgctaagatatcattgacgtcgctataggtcattcggaaggttgtattgatcactgtttgggtaatggtatgcttgacgaccttgccatgtggatcaatctccatgatggcagactgggtcagacggtccacattcggattcaaagaacagatcccattggacagacgctctggcaacatgggtactactcggtcggtcacatagacagaggtcgcacgatttagagcttccttatcaagagctgagccttctgtaacgtaataagaaacatctgcgatgtgaacacccagctcaaaattgccgttcttgagtagcttgatatggaccgcatcgtccaagtctttggcatctgccccatcaatcgtaaaggtaatctcctctcgcagatccaatcgtccctctaaatccttttcagatggtacatctggaacctgctcagcctctttcaacacttcttctggaaattctgagacaatgtccatggattctagcacttccaaaacatcgattcctggatctgttacatgaccgaccacatcccgcacagttgccacaaaataattgtgcttgcggctcgggtattgatcaatttcgaccttgaggatttcggtcccttccaattggatggctggctttttcacatagatcagctggctgatcttttgatttttcgaacgaatgtagccggcatatttgggcttttcctcatccagaacaatttgtccaactaccgttctgacactatgttccaagacatcaataatcttagcttccgctgccgttcctttgtttcggtctgccaccttggtaatgacgatctcaacggtgtcaccatcgatagcatgattgacatcatttcggccaacaaagagatcctcttcttcgccctctaaactgacaaaaccaaagccatttttatgggcatgaaagatccccttgagggtaatggctggggccttcttttgagccaaacgaagagagccatcatcttcgaatttcaactcatgacggcgttccatcagagagatggttttgaccaagtcacggaaatccttagccccttcttttcctagagctgctgccagatcattgatctgggctttgtcatgctcttgtaaatattctttaatacttgttttcatgaatgtttttgctggttatccagcctccttttttctatctagttgtgtcatcatcggtttgcaaaataaaaataggcaaagacattgtctgagcctatcttatttactagaaagtaccattaagatcatcgcaatcaataaccaagtaaagaccataactgccgtcaaacgctgcataacggcttcgaacccacgcgcttttgaacgttcaaacaagtcatttgagctagcgtcaaagacgttgctcgattggtttttagttggttgcataaaaattgcgataataatcaatactgataatactagtaaaatagttgttaatgctccgctcatattcaaaactccttaaaatccttactattataccacgaaaatcatttggattcaatatgtaaggttacttttctttccttaggacaatacttcaagacctcgatcttttcaggatgggttttggtatttttactggtcaaataattctgactcccacagctggagcaggtcagttgaactttaattcgcacgtacgtctctcactttcaaatactttctaaataagaataagaggaaaatcaaatcggtaaaggccaagagggctgtgccgtaaaaaacccaatgatagccaaaatgcatgaaaatactcgatcccatcattggccctaacacgccacctaaataataaaagagctggttatagctaaagatccgagaaatcccttcaggaggggttaaacgattcaataatgcagaaactcctggtagtagggctcctgtcccgatcccaaagaggaagcgtaaaattcctaattgaaggggtgtttgcgcttgggcacaaaggatatagagacagccactataaagaagggcgattaataaaagccggtgattcccgattcgatctccgagttttcccatccaacctgaaaagagcatactggagactcccatagccgaaacaatcatccccgatacaaagatcagattatctctttgtcccaaagctcgcacataaagaggcaggatcggagaaatagattgagcaatcatttggatggtcatgctggtcaaaaagaggcccaagaggatatctttttgctgaatggacatgagcaactgccaactggatttttgttcttcttttggaaggggctcatagtcttcctcaataccccagaaggttaagagagaaaccaaaaataagaagaagccgaccaagagaaagacattgcgcatgcccagattttcagcaatgagtcccccaatcaaagggcccatcaaggttccagctacgacaccagtcgacaaagtccctagagcatagccagattggtcctttgatacttgactggcaatcaaggctgtactattagggacaaagcctgaaaagacaccgttgagaaagcgcaaaaccaagagccaaaagacggatggcacaaaggcgatccctcccatggtcagagtcatagcaatagaagccctgagcatcatgggttttcgaccatagcggtcggccaggctcccccagatgggagacatgatcgcagaggtcacagaagaactcgcaacagcaatgcctgcataaaagggaacagccttgcccgtaacgcccaactcttctacaaagagggccataaaaggcacaactaacgaaaggctagctccaatgaaaaagcacccgatccaggcaatatatagatttttacgccaattgatttctcttgtgataaaatcatcttctttctaattgttgtagggctgcatctaattgggcgtagagggccgttagatcgccattattgtctaagaccagatctgcatgtgctcttttttcatctagcggcatttgagcagcgatgcgttcttgggcctgcagttctgataagtggttgcgttccattaggcgcttaagctgggtttcttttgatacagctaccaaccagacagattcaaaccacccttcatagtgctgctcggttaagagaggaatatccataaaaaagagatcggattgtgcagcttgtctgtctcttacctcagctagagcctcacgaatgagtctgccttggacgcggttggaccagtctctttcactagggtctgaaaagatccgctgacccaaagctaggcgatccagctctccttctttggtaaggatctctttcccaaaatgatccactaggacacggtagagttctccacctggtgcctgcaaatcatgaaccacttgatccgcatcaatgacaggataccctttttctctcagataggaggtcacagtggactttcctgaagcaatccctcctgttaatccgatgattctcgccatctagttctccttttggcagtgggggcaaaaatgggttccgcgtcccccgagctggattttctcgatcggtgtcccgcagcgcaaacaaggctggcctgttttcccatagacctggtgttcttcctgcatggtaccatcttctccaaaagcattgctgtaggagcgaatggtggagccacccttttcaacagcctgagcaagcacagcaatcgtttctttgcggattgctgtggcttctctagcagtcaggctttgacccaaacgggctggatgaaccttagctcgatagagaacctcatctacatagatattgcccagaccagccactaatttttggtccaaaagggctgatttaatgggtttctttgattttttaagagctgcttggaaggctggcgctttaaaatccgcttctgtcggctctggaccaatttttttcgccaaaaaatagctgtcgacaagctcaggtatgatgacttccatggtcccaaacttgcggacatcttcatagaccagggtgctgccatctgtaaaatgaaagaagacatgggcgtgcttgcgaagagggacttcgtctggataaaagaaatacttgccttccatccgcaaatgcgagatgaggaccagatccgtcagataaaacaagagatatttcccacggcgccccatggcccgaatttcttgccccggaagatcttgacgaaaagcatcccgatccgtctgaatcatctttggatactttacttccacggactggatggtttttccaagaattaatttctcaagacctcgtcgaacggtctctacttctggtaattcaggcatagaactcctttcaaaaacaagaagcaggccttctgcccacctcttcttaatattctttttcgttgtatccgaaatcggcaagatccaatttcttatcccgccaatttttcttgacttttacccaggtttctaggaagaccttgtccccgagcatcagctcgatatccttccgcgcaagggttccgatcttcttaagcatagccccgccttttccgatgacaatgcctttttggctatcgcgctcgaccatgatggttgcgcggatatgaaccttatctgtctcttcatcccgcttcatagaatccaccactacagcaacagagtggggaatttcttcccgcgtcaagtgcaagaccttttcgcggatcatttcagaaaccaagaagcgctctgggtggtcagtgatttggtcggcagggaaatattggaaaccttcttctaagttttcacttaaaatatcaatcaaacgcgaaacattgtttccttggagggctgaaatcggcacgatttccttgaaatccatctgactacggaagtcatcgatttgcgccaagagttggtcagggtgcaccttgtcgatcttattgaccacaagaacaaccggcaccttagcagccttgaggcgttcgataatcatgtcatcgcccttcccacgtggttcatctgctggcaccataaagagaacggtatccacttcccgaagggtgctataggccgactccaccatgaagtctccaagcgctgtcttgggtttgtgaatccctggggtatcgataaagacgatctgttccttatcggtcgtataaatccccataatcttattgcgcgttgtctgcgccttgtcactcatgatggcaattttttgccccatgacgtggttcaaaaaagttgacttcccaacattgggacgtcctaaaatggctacaaagcctgatttaaatgtcatattatcctttcacgagggcatactccctcttatccaaataccaaggcccagaatttgggcacaaaaatcaccagtcctgtaagtagggcaaagcctgatacgacgaggactgctccagccgccatgtctttggcattctttgccaacatggagaaatggtagttactagctagatccaccacattttcaatggctgaattcataatttcaaaagcaatcaccaaggtgatgctgagcaacaaaaagagccactctgtcgcagaaatcctaaataccaaaccagcaagaattgctacaagggctgataaggcatgtttgcgcatattgcgctcttctttgatcgccgtgaaaattcctgttatcgcaaactccaaactggaaataaagtcccgatttttccattttcgcttattgtcttgtgagtccataggctgtcaaaatctcttcctgtaagccaaacatttccttttcttcttccggcgtataatgatcatagccattaatgtgaagaaaaccatgcactgctaaaaatcccatttcgcgctcaaaactgtggccatattcttcggcttgctcacgcgccttgtcaattgaaataaagagctcaccaatataggtatcgaattcagccatcatctctgccaattctggattttctgcaaggtcttcctcgtcaaaagaaatctccatctctggcttgtattctaaactaatgacatccgtcggacgatccgtatcacggtattcaagatttagttcatgactgcgttcattggttacaaaagtcacagccatttccttgtcttctttcccaatttttttagcagcaaattctaaaatttcttgcgtttgttttaagatttcgtcagagacttgaccagtctcatctaccatttcaatatacatctggatcacctcactattatcactttattatatcacaaaaaccagcctatatactagatacagactggtttaaaatatagatccgtagtttttcatatcaaaatatcaagaaagatataataatttttatttttttgatcagtcaagacactaataaaactttccgccgtgagaaaagtgcttgaaacagtactgtttcaagcactcgggagttttgagagtaaaacagtttgggaaactgttttagcctgagccaagaaattaaagagcgaaggagctcaaaaccaattgaacacgggctacggatcgtgtcaaaaagacaagttctcctagaatctaaagattcttcgtcaaacttcctattttgactttatccgcagacgccctttgtatcttgatttagtcatggaacttcctggactgctgaaatcatccactggataatttcacctaacgtccgtaatcacataaggaaagtttctaagaatcttttatcccagatattaaccagcttatatctaaaatatagtctgttttattacaaagataaattagctagggattttcctcgtcttaaacagtggaactcatcttacaccactgtttgctgaatggcattcatctgggcatagataccgccttgtgcaaccagttcctcgtgtctaccacgctccacaatacgtccttcggataagactaagatctgatccgcatcttgaatagtggacaagcgatgggcaatgataaaggtggtccggcccttttgcaagactgccatagccttctggatgatttcttctgtttccgtatcaatgtgagaagttgcctcatccaaaatcagaatttgcggattcatatagagcgtccgcgcaaaggaaatcaattggcgttcgccacttgaaaaggcggatcctttttctacgactggatggtcgattcccttttcaaggcgctctacaaagggccaagccccgacttttttcaaggcatctttgaccgcatcccgatcaatgtgttcctgactcatggccacattactagctatggttcctgtaaatagataaggatcctgcaggacaatccccatatggcttcgtaggctctcacgagagacttggcgaatatcttgaccatctatcaaaatcgctccttcttgaggatcataaaaacgatagagcaggttcataatcgaagacttacccgatccagtatgacccacaagagcaatggtttgcccaggacttgcctgaaaggcaatatctctcagaactggcttgccttcttcataggcaaattgaacatcgttaaacacgacttctgccttttctatcttcagttccaatgcaccatcagcctctaacggttggtctaagaaagcaaggacgcggctccccgtttctaaggatcgccgaatatttgggaattgacgactgagattggccatgagatcaaatagattaatcacatagttaatattgataaataagaaaccagccgtcacaccgatattaccctgtaggaaagaaatcccagcgatagtcaaaatgcctgcaatcactaaaaacttgagcaattccgtcaaggtccaagaagcaatagaatcggctaagagaattcgatcattggctcctaacatcttctgagtagtggcttcaaactcctccaccacaccaggctcttgatgatagagctgaatcatactggcaccatgcaagagttcattgacctgggtattgacctcgcttcgcgcatcaaagaaatccttcataggctgatccgtcatgaccttgtagagatactggatcccatagaaaatcggaaagaccaaacacaagagaaggcccatcataggactcaggtaaaagagaatccctagaataaagaggaaacgcaccaagtagatgactaaaatcatacaagagttataaaactgggtccgcaaggtctccgtatcattgacaattcttgtcgcgatcttcccagccggcttatcatcaaaataagaaataggcaacccttgcatgacttgaaaggcttggtctcttaggttagccgtcacttgattgcttccgtgtagcaagatccgattccctaggtagctaattagctgtccgatgctcaagaccaagagatagaatcctcccatctgaagcaagtccccttgccctccaccgtgggtcagcgcagtcaaaggcccatcgatcatcttttggagaagaaagggagacaattcagaaaaaatggtggctagtaagaggcaaataaagccagcaagaaagacagttggataaagcgtgatcctagataataatcgtttcaaaactttcatcttattctccttcctgtttttgttgccgttggtattgttcataataccagccctcttgagctaataaatcactagccctgccttcttcgacaatctgtccttgatccaagacgatgatccaatccgcctgatggacagccgacaagcgatgagaaacaatgatggtcgtcttgtcttttcgttctttttgaatcgtgtcaatgatggcctgttcagtcttcgcatccactgccgaaagggaatcatctaacagcaagagctctgcatctcttaagaaggcacgcgccaaagagatccgttgtttttgacctcctgatacagagacccctttctcaccgatcagggtgtccattccatgagacatcctttcgagatcatccgcaaaagcagcctgggctactgcttccaccaagtcatcttggctggctccttttttaccaagcgctatattctcacggatagacttggagaataaaatatgttcttgggaaacatagccaattttttcttcgatggagtgtcggttgtagtccacgatcggttgctggttgaccaaaaactctccctcaccaactgggtactgccgcaagaattgtcgaaccagggtagtctttcctgcaccggtacgaccaacaattccaaccgtctgtcctttctgaatggtccaatcaatgcctgacaggctctttcgctcaacaccaggatagctgaaagaatagtccttaaactgcaccaaatcaatctgctctaagtagtgaggaccatctggctccagatcatccgtttcatcaatcacttcttttaattttttataggacatttgacctgtctggtagaccaagatcaggtccgccatcatccacataggctcaattaagaagaccaaatacagctgtaaagccaataacttaccaaggctcaactgcccgcttgccagggactggcctccaaatagcaggagcaagaccgtcgagaatccaataaacaacagggctaaaggtccaaaagaatactggatagaggcaattttgtcccctgttttggatagactggctgtttttttctgaaactgtttgacctgctggtcccgtctactataggcccgcatgacccggatcccttcgatggactccaagacttcatcgttcaactgagcgactgcttcccggttttgctcaacatactcctcctgctttctactcaaaaaataggtagagacgacgaggaagatcatgggaataaaggaaatcaaggttaattgccaagaaatgaaaaacatggtcggaataataaaggcaaacaagccaccgccaaacaggagcaccatcatcccgtaaccagccatatcggccatcccatccacatctgtcgtaaagcgcgtcaagagatctcctgaacggaatttctcaaaaaagggacgccgcatagctactagcttacgaaacgcttgtccctgaagggtcgccttgaaatggactgacgactgaaagaggcgcaactgccaataaaaagccgtcaggtaattgaggatggctgatcctaccaagaggaccatatcccatacaaagttcgattgcgtcagcgtctgctgactcaaatgatccactaaacgctggataacttgcgtcgggatcaataaggtgtaatcataaagaatcaggaccatagcgatcttcacatatcgccacttgcgttccctgatatactcccaaatagctctgatcatatattctccttttcaaaatggcacagaaaaacccaagcaaggagctgagtacgtgctcagtccacacttgggccttctgatgcctatcaccaattcagttaaggcaggtaaaaatgcatacaaaaaacccaagacaaactcctccatcttgggttccatttatagtttacatcgaactcaactgagattggagaagctgtgtattcaattgtgtcatcaaaacatctactttgttcatgatggttttctcctttctctttgttgttctaactttaccacggatttccttgcttgtcaacgtttttttgaaaattgttgaaaaaaccggacttttaaagatggactcgcaaaaaaagaagcctagaccctctctaagcttccctcttctgctatgctagttgccgggattgaaccggcgacctcatccttaccatggatgcgctctaccgactgagctaaaccagcagtacctatctactatatcatggagataggtcttttgtcaatatcctgactcatttttctgccaaatattcttccttcgtgaggacataatgaattctcgtcaccattctcccttcttcatgcaagtctagcatcgcgtagggctcctcgtgagaatatttcatccctgatttggccatcacccgtccagaagctggattgtcctgatcatgaacagcaatgagtttgttcatccctaactgttcaaaagccagagcaatgactgccttggtagcttctgtcgcaagaccttggttccaatagtctttattcagaacatagccgatactcccctttttcagacaaagatccaaatccagtaaatcaatcgtcccgataaattttccattttctttgagttcgatcccccatcttccaagtgggctcgctaggtaaaagagggcaatattattacgcgtctcttctagactttgattggttgcaaaggtatagcgcgtaactgtctcatcagaagcatactcaaacatagctggtgcatcatcaagagtgaccggacgcaagtgcaaacgctctgtctccacttcacgataagtcgctaacttcacatataaattttccatttgacactccttctttaggaattagtttagcaaataagctaaaggaaggcaagctcaaatttttcttgctttttaacccacttttctatacaataaaatcaatcaaaacaatcggataaggagtgaaaaggtcattgagtcaagagagtaatctcacaccaatgacctttttacacctaaatctgagcaaggaggcaagaatgctcattggaattcctaaagaaattaaaaacaacgaaaatcgagtcggtttgactcccgcaggcgtacaaagcttggtcaagaaaggacatcaagttttggtggaaacaaatgctggacttggttctggctttgcggatgaagattacacgaagcaaggggcaaccatcgttgcgactgctgcagaagcttgggccactgagatggtggtcaaagtcaaagaacccctcgctgaagaatatggtttccttcgcgaagacctcttgctcttcacttacttgcatatggctgccgcacctgaattagcggacgctatggtcgcagctaaaacaactggggtggcctacgaaaccgttcgtgacttagatggacagttgccactcttggtgccaatgagtgaggttgctggacggatggccgtgcaaatcggtgctcacttcctgaccaaacaagaaggtggatcaggagtcctcctaggtggggtgccaggtgttcccaaaggaaaagtcaccatcatcggaggtggggtcgttggaacccatgctgctcgtatcgcccttggactcggtgcccaagtgaccatcttagatatcagcgctaaacgtttggctgttctagaagatgtctttggtcatcaaatacaaacccttatgtccaacccatttaacattgaagccagtgtccgtgatgccgatgttgtcatcggagctgtcttgattcctggggctaaagctcctaaattagtgacagacgatatggtcaaacaaatgcgtcccggttcagtcatcgtggacgtagctgtagaccaaggtggtgttatcgaaacagcggaccgtgtcacaacgcatacggaaccagtttacgaaaaacatggcgtgctccactatgccgttgccaatatcccaggggctgtcgctcgtacctctactatcgcccttaccaatgtgacccttccttatgttgaatccctagctgacaatggcttccacaaggccatcgccctcgatgaaggcttgcgccaaggtgtcactacttaccaaggccatatcacaagccaacctgttgctactggtttagagcgtgacttcacaccaatcgatgaattggtttaatttctaacattcaaaaggcaaagatccgatgatctttgccttttcttttattcttcttccacatccggtttttctttgagcactggatttgagattggctcgtaggcccggataatctctgctactactggatgacgaacgacatccttggcagagaaatgcacaaagtcaatttgagaaatgttcttcaatttctcctgagcatcaatcaagccggatttaacatttcgaggaaggtcaatctggctggtatctccattgacaatcatcttagagttaaaaccaagacgggtcaaaaacatcttcatctgcatgatggtggtattttgcgcttcatcgaggatgacaaaggcatcgtccaaggtccgtccccgcatataagccaaaggcgcaatctcgataatctcccgctccatcatccgagttgtttggtctttccctaaaatctggtaaagagcatcatagaccggacgtagataagggtctactttttctttgagatcccctggtaggaaaccaaggctctctccagcttctacagcaggacgcgtcaaaatgatccgcttgacctgaccacgcttgagggcagtcacggccaaggtcactgctaggaaggttttcccagtccccgctggtccaatcccaaaagtgacatcatggttcttgacactatccacatagatcttttggctaagcgttttaacccgaatgggcttgccgtaactatccttgataatctcttcttcatagagagcgatgaacttatccaattccccatttctgaccatggtaatggcggtcaccacatccggcgttccaatggtcatgccacggttaacgaggaccaaaagagcctggatgacttgacgaacttgctcgcaggtttcttcttccccaatgatctggacgatttctgtccgggcatgaatagtcaccccaaattcttgctccatcaaacggagatggcgttcgttagatccaaacaaatgaaagagatcgtctggatgcgttaatgtaatttcaactgaatgttcttgcaaataaagaacctctctacctgtgtttttctattattataacaaagaggccgagaaaaaaccatcctcgacctgtccttttctagtgggcttggtattcttcccaaatcgcatcaaaatcgccaagattaaaggaaaagctggcatgctcttctagatagcgactgacctcatcgaagtcatctgtatgcttgggaaaagcagactcgtgaaatgcaagatctgctagaatggctttaggagcattgcttttaggattgcgctccgtcatcagccaagtataaaacgattttcgcataagcctcctcttagatcaactctgttccaaactggtcttgcttgatttttttggccttcatcaaaccacccaaagcctttttgaactgaccttttgaaatcccaaaagttgccttgatctcttctggagaggacttatcattcagggtcataaagcctccattggcttccaaataggttaaaatcatttgtgcatcgttttccaacatctcaaaggagcgtggcttcaaagataaattcaaggtccgatccacctcacgaaaaccgatgacgcgggcatttaagacctctcccaaacgaggttctgcatagcgctcacttgggtggataaagcccagcatattgttctctggaaggtaaacaaaggttccagacaatttcaagcggtagacaatggctggccagttttggttttgcatattgttgtaggctggacgagccaaacgctggaaatcttcctggtaggctaagatcccccaaatccgatctttcttatcaacttctaagcgaatatagagacgatcgccctttttaggccatagatctttgatctccggtaggatatctagtgagacaacaatctgcttatctggaagccctgtatccacgaagactcccaaatccttgcgcacttccgtgactgttccccagccaaagctttcttgagttgctgtgacttcaagtgtcgtgagtctgagcttttgcttcatatccgtataggcaaagcccttgacactttctccgacttgatgggggccttctgctttatcaagcgcgtaggtctggccatctttttgaacaaaatagaagtgatcattttcatcgatgaccattcccatgatgtagcttgctagattcgtattcatgtttccttctttcctcttgcttcttcacaagaataatggaaataaaacccagccagcagtgccaactgagtctttctttcctgtaatggttgggatggattaaacttccatcaattctttttctttatgagctgtcatttcatctacatgcttaacagcgtcatccgtaactttttggatctctttttcaagacctttcaattcatcttctgtgatttcttttgctttttcttgtttcttcgcttcatccatagcatcgcgacggatgttacggatcgctactttagcattttcacccacttttttcacttcttttgccaagtcacgacgagtttcttctgtcaaagctgggataaccaaacggataacagatccatcgttggctggagtgataccaaggtcagaagcattgatgctatgctcgatgtctttcaaagatgatttatcaaatggtgtgatcaacaagacacgcgcttctggaatcgtgatagatgccaattggttcaatggtgtttctactccgtagtattctacgaaaatacgatccaaaagacttgcatttgcacgtccagcacggatgctaccaaattcacgtcccaaactttggtgagactgggtcattctttcttttgctttttctacgattgggtttgccataatcttcctctattttctattatttttctacgttattcgatacggttgtaccgatattttcaccaaagacaacacgtttaatattgcctggttcattcatattaaagacaaccaagtcaatgtcgttgtccatggagagagtagaggctgttgaatccatgatgcgaagacctttattgatcacatcacggtgagtcaattcctcaaatttcacagctgaagcatcttttttcggatcggcattgtaaacaccatcgaccccatttttggccatgagaatggcatctgcttcaatctcagctgcacgaagggctgcggtcgtatctgttgagaagtaaggagaaccgatccccgcaccaaagatcacgatccgatctttttcaaggtgacgaagggcacgaccacggatatatggttctgcaacttgttgcatagcaatcgcagtttgaacacgggtatccacgccaacttgttgaagcgaatcagccatcacaagggcgttcatgacagtaccgagcatacctgtatagtctgcttggacacgatccatccctgcttcagcagcaggttctccacgccaaaggtttccccctccaatcaccaaggcaatttcaattccaagttcatgaacttccttgatttcttgggccatattttggacagttttgatatcgattccgacaccacgttcgccagcaagggcttcaccagatagcttgattaagatacgtttatacttaggttctaccattttctctctccttttttgatctgtattattttaccataaattacgttttttatatagtcatatccatcaaaattttcttttttccatccgattagttttaccaactgtagcaaataaaaatgaagtacaaaaaaaagctacccgaaggcagcttttcatttcaattaaagtgagttaacatccactttgataccaggaccttgagttgtagtcaaagtcaagctagttacgtaagtacctttagctgtagctggttttgctttttggattgtgtcgttgaaagctttaaagttttcaaccaatttagtatcatcgaatgaaactttaccgatgatcgcttgaacgatacctgctttatcagcacggtaagtgattttaccacctttagactcttcaactgctttcgcaacatccattgttactgtaccagttttagggtttggcatcaagttacgtggtccaaggacacgtccaagacgtccaacaagagccatcatgtcaggtgtagcgataacaacgtcgaagtccaaccaaccatcgttgattttcgcaacaaggtcatcttcacctacgaagtctgcaccagctgcttttgcttcttcagcttttgcaccacgtgcaaatacaagtacgcgagctgttttaccagttccgtttggcaataccattgcaccacggatttgttggtcagcttttttcacgtcgatgttcaagttgtaagcaacttctacagttgcgtcaaattttgcaaagttagtttcttttgcaagagctacagcttcttctacgctgtagacttttgtgctgtcgattttttcaagagcagcacgaagttgtttgctttttttagccattttatctttctccttgtaatgtggtcatatcgattttcatctcccacgtcactcgtcatttgatcaagtgtattgcgggcaaataggattgttacaattagtcagtaacagtgaatcccatagaacgagcagtaccttcgatcatacgcattgcagactcaatgtttgcagcgttcaaatctggcatcttagtttcagcgatttgttgtacttgtgcacgagttacagttgcaactttcgttttgttcggtgtacctgaacctttttcaacacctgcagcttttttcaaaagaacagcagctggtggtgtttttgtaacgaaatcgaatgatttgtcttcataaacagtgataacaactgggatgatcataccagcttgatcagctgtacgagcgttaaactctttagtgaatcccatgatgttgatacctgcttgaccaagcgctggaccaaccggtggagctggagtagctttaccagcagggatttgcaattttacaagtttttcgacttttttagccatttcttaaatcctcctttgtggttttggcggtaattacagatttttacctcccacaagtatgctttgtgcatacctttctattatacacgatttctctttttttgcaagaaaaaattaaaatatagtaaacttttttttcgttttatgatagaatgaagctatgttaatcaaagttgcttctgtattatttatttttttaacgctgattctgagcggcatcattgttcacctctttaaacttcaaaaaagaggatggcgatctactgatattgcctttcctttatttgccttggagtactacctgatctcagacagcgctttttaccacagcctcttaccactgctagccttaagcctttcgcttttggccttggggctaacggtttatttcttaaaaaagaaaaagagtttttattatccgaaatttatcaaatacttctggcgcgctggttttctgatcaccttcttgctctatctgatcctaaccgctagtttgtttatctaatactgaaaagaggctgggacaaaagtcctagcctctcaattatttttggattgtcgagcaagacgcagtggttgagtgggctctactacgctgatttcatcagcttttacagccctactcaactgtgcggaggtgggacgacgaaatcgaattctaacgaattaccgatttctgtcccactctctttttttttatttcttccgatgaaagaaccagcccaccaacttcttgaaaacttgaatcaagatgagagcaagaacggccatgatagcgcagataaccagcgtttgaagcctcaaggggctcatgttaaagaatctacctaagatactacttgaaaccaggaaggctaggatatttcctagaagaaccagtctcttgtagtgattgagaggctgggattcctggtagatgatggtaaaaccaacgaaggctatcaagcagatggctgcactcgagagttcttccgacctcaggccaaatgctgaagagagcaataccagactgaagatcagtataaaatccgtcaaggcagcaggtagcgcatttttaaagaccgtttcgataaagtgccctttgatgcgctcgctattgggctcaagcgctaggaagaatcctggaatcccaatcgtaaaaccactgatcaaagacatctgcgacggcatgatgggataagtaaaggctaagagcgtcactgagatggccaacaaaatagaaaagatattcttgatcaaaaagagactggctgatcgctgaatattattgaccacccgacgcccttctgccacgatggacggcatctttccaaaatcggaatctagcaagaccacttgcgccatctttttggtcgcatcgtttccagattccatcgcaatactacaatccgctgtttttaaggccagaatatcgttgacgccatctccagtcatggcgactttatgaccctttgcctgcaagccttctacaaggcttttcttttgctctggggtcacccgaccaaaaaccgtatactggctcgcagcctggtgcaaatcttcttccgtcagtaaggttctggtatcgattagatcctctgctccttcaatgcctgctttttgtgcaatagctgagaccgttgctgggttgtctcctgaaatgaccttaatggtcactccttgttgtttaaagtaggtgaaggtttccttggcattttttctcaaaggattggagagaataatccaggccaccaagtctacgtgagcctctaaagtctctcccaggtgatctccccgatatttcccaaaggccaagacccgattgcctgcctgcgtagcagaagcaatctcctctgcgacctctgaaaaaccttctcgtaaaacaaattctggtgcccctaatacatagatcccagattcaaaggcaatggccccatactttttcttggacgtaaagggctgaatgtcgagagccttccatggctggcttactggagtcttgtgaaattttcggatggcatccatggtatcgttttgatccatactagcttctacatactgagctagagcttccaagtcttgagcgtctttaactggacgaatctctgttacttccatacccggctctgtaatggtccctgtcttatcgacacaaaggacatccacgcgcgataaggtctcaatccccttcatgctattgagcaggaccttttccttggctaatctgacagcacccagagccagtgccaaggtcatcaagagatacaagccttctggaatcatcccgatcaaggccccgactgttgaagtcacactgagcttgaggctatcacctaagctgatatagctgcgaagaaaaaggagcgaacctagcggaatgataaggagaccaatgatccccacaatgcggttgaccgcatggaccatgtcggactcctcatgagacttgacttgcttagcttccaggctcaattggttgatgtaggagtcgttcccaactttttccagtctcgctaaaccttgaccagcgatcacaaaactacctgacatgagtgcgtcttgtgctccttttttgacctcatcggcttcaccggtcaattgcgactcatcgacttttagctcgccctccagcaagaccccatccgcatagatctgatctccagcttgaaagcgaactagatcaccctccaccagctgatcgatcggtagagtgacttcttttccttcgcgaagaacaatcgcctcacttatatgtaaaaattgcatctgacgcaagatccgtcgagagcggacttcctgcacaattcctaccaaggagttgactacgacgaccgggacaaacaagagattgttccaagacttcactgctaccagcaagaccgctaagaccaggaaaatcagattaaagtaggtaaagacattgtctcgaatgatctgcccaatacttttttctgtcttaatcgtgaccttattttgcttgccctcttggatcttttttgctacttcttcctgactgagtccttctaatctaaccattgctttcctcactcatgtatttccaagggcaatccttctggatcgaagaaaaatgccatcttcttgccatcaaaatcatcatagcgaaggcctgtattctcaatacctagctgatccaatctagctagatacgcctctacatcgtccactttaaaggccagatgacgcagtcccgcatgctcgggcaaggggatctttggacgttctggggccgtcggtttgataaagagttctaaagtcagctccccctgacggagattgatcaagatatctccgcgttcgggacggtcatactcactgacaatcgcaaatcccaactggtccacataaaagtgcaacatggcatcgcgatcccgtccaatgatggcaatatgatgaatcgtgtctaacttcatctggtcctactttctattttctataaaaagaaaagggagtgggacatatgccctttttccctatccttaagattgttgcaatacttttcgaggtttggtcccttcagctggtccaatcacacctgctgcttccaactcttccatgaggcgagtcgcccgattaaaaccaaccgataagcggcgctggatcatcgaagcactggctttttgggtctcgatgacgagcgctttggcctcttcaaagagtggatcgccttcgtctgagccacccatacctccatcaaagtctgactcagatacttcacctggatcgaaggcatcatcataatccgcttcagcttgttctttgacgaagttgacaatccgctccacatcatcatcagagataaaggagccctgtagacggatcggatgattttcatcaatcggtttaaagagcatgtctccacgaccgagcaatttctccgctccattttcatccaagatggtccgtgaatcggtcccagatgataccgcaaaagcgacacgggaaggcacattggccttgatcaaacctgagataacgtcaaccgatggccgttgggtcgcgagaatcatgtggatccccgctgcacgcgccttctgtccaaggcgaataatagcatcttccacttctttacttgcgaccatcatcaagtctgccaactcgtcgacaatgaccacaatcaatggaaggggcacttgcttcatctcagactgggcattgtactcagcaaccttggcattaaagccagcaatattacgagcacccactttcgaaaagagctcatagcgattttccatctcatcgacaactttttgcagggcccgactggccttgcgtggattggtcaccactgggatcaagaggtgaggaatatcattgtagacagaaagctccaccatctttggatcgaccatcataaacttgacttcgtccggacgagccttcatcaagatactcgaaataatcccattgaccgctactgacttaccagatccagtagaacccgctaccaagaggtggggcatccgagccaaatcaaaggtccgagccgagccatctacagcctttccaagaggaatctcaaggagtttagccggatctgttttggactgctcccacaattcacggaaggaaacggtcgcaatctctgagttgggcacttcaatcccgaccagagacttccctggaatcggtgcttcaatccgcacatccttggctgctagggccaaggccaaatcatctgctaggttcgaaatgcggttgacccgcacaccgacagctggcttgacttcatacttggtgacagaaggaccgatttccgcccgctccactgtcgccttgatattgaagcttgcaaaggtctcttccaaaatgcggatgttctggcgaacgatgtttttctctttggattgatttttcggcttatcaggtgcgaagagatcaatggttggaagcttgtactggaggagttccttaggtgtgaaatccacttgaacttcttccccatcgtcctcgaattcttcggcttccggaaactcttcgtatgcttcgggctcttcaggccattcttgatctggcaggtaaatctctggtgttgctggtgcgacaatttcggcttctgggaagggctctgtgaacggctcttcctccaacacctctcccgtttcagggtctacaggatgcccttccattgaaaggggagttggaagaactgcacttgcttcttcttgctctcgttcagctgcagcagcttcctcagcagctctcgcttctttttcaaggaatttctgttcgcgacgttctttgcgtttttccatagaagcgtggaaggcttccgatcccttttcaaacaaatcatagatggagtaaggactcatcaagagaatccccaatccaataaagagaaggccaataaaataagagccaatatttgaaaagaggaaggaaatcggagcataaagaagggcaccgatcataccaccaccggcaaagctctccactcgcagatgaataaagtctgccatgattcttgaaaaggtgaccttgattccattattgtctaaatgaagggaggatacaaagaaggcctgaaacatcaagagaagcccagtaaagaagcttaggaatcctgaaatcaccccttcgtgtttgtccagccatttaaaggcatagaggtagaaaaaggtcgctaaaatagccaagtaagccaaactcccaacaaagagtcggattaagttgtaggccaagacccctactgctcccaatttcaaggccgcaaaaactaaaaccagactaatgagaatggtcgcaatcatgcgatgaatcgctttttttctttctaattctgctttggacagtcgtctcgtcgaccgtgtttttttcgattgattattgtttgccataacctttattatatcacatttccaagccagttctctagtaaaatcatttcctcaattttgcagcataaagtaaaaaacagcaccgagtgggtactgttttagatatttttcttggggtggcggtcaatgatggcttgatagtcttgcaacgcttgctttcctttgtccgtcaactgataaccccgaattgtgaactgctccgccagttcttcctccgtaaaatggtcagccaaagcttggttcaaatcagctgctttcatcttggacaaacccgcgactcccttctttttgagaatggcttttttcatggtcgcattgatatggtccagtgaatcaaaagcggattcgataaaagcatagcccttatccaccaaagccttcaagtgttccgaagcatgaatcccataagtatattcgaagtacttaggaaaccaagtctctgtcgtaaaggttccaaaatggattcgccacaagagaatgatatcccctgcaagcaagccatctcgaagggaacactcattaaggtcatcccaaagacccgttgggttgttgacaattgttcttctttacaatgaactagcatcttgcgatttcccaatggataggaaaaagcagcaatcaaaatgaagatactagctcgcacaacgccttctccgagacctcgtccaaaatatggaatttgtatcaatacaattcctaacaaaatcagtaaagtcattcctaactgttttcctggaatcttttggccaaaaagtggggtcagaaggagacctgctaaaatcgtgatctgccaggtcgcagccacaaaccatgattctccatagatagaagccatcgataagggcgcataaaagagaccaaagccgaccgtactccagagcaaccaagtccacggggctcgtgcaattgctgacaagacacccttcaactcgcctttctgccagactaatacagccatcatgggcaaactaaaaaggtaacgcaaactagcactccacatccaggaaccacctgccaggttcatgcttcgattaaaaataaaggtaaatgcaaaaaagagagcacctaggatacctaaccaaagggctctcgcaaaatgtgatgatttcattttttgatgatcgttctcctgtagtcatcctattatacaagaattcggaaatactttcatctgttttccgcaaattttcaaaatagtgtttcgccttaaattttatccagatttgaaagtatcgtaaaattaaggtacaatagaaaaagacaactatgttggaaaggaagaatatgaaaaaattaatcgcactactattattttccggcttggctttaacagcttgttcgtccaataaaacagacgctaactcttcaagctcaagcaaagaaaagacagagcagacagcaacttctagctctagtgaaaaagatcaaaagaaaattgaagaagaacaaaagaaattagaacaactgcgcaaagattttaacgatgccatgaccaatgaaaatgccgtcttcccacaactttcaactgacgtggctgaagacgaagcggaggttaaaatcacaacgactgaaggcgacatcactgtgaagctcttccctaaatatgccccacttgcagttgagaacttcttgacccacgcaaaagaaggctactacaatggcttacttttccaccgtgtcattaacaactttatgatccaaactggggatcctaagggagatggtactggtggcgaatctatctggaagggcaaagacaaatccaaagattcaggtactggttttgagaatgagtattctccatacctttacaaccttcgtggagcccttgccatggccaattctggtccaaataccaatgggagtcaattctatatcaaccaaaataaggatgatatttcaagtaaactcccaactgaccgcttcccagctaagatcatcgatgcttataaaaatggtggaaatccaaccctcgatggtggtaactacactgtctttggccaagtgatcgatggcatggatgtggtcgataaaattgcatctgccgaaactgatgataaggacaaaccaaaaacagacatcaagattgaaaaaatcgagatcttaaaagactataatttcaaaaaataatgaaaagagaaccgagaggttctctttttaagatattgataaacattttacataaaattagctaatagattcattgtaaaaaaatgaattctaattatttaagtcattcatctactgaaactttctgccgtgagcaaagtgaggctgggacaaaagtcctagcctctcaattatttttggattgtcgagcaagacgcagtggttgagtgggctctactacgctgatttcatcagcttttacagccctactcaactgtgcggaggtgggacgacgaaatcgaattctaacaaattaccgatttctgtcccactctcactcggaattattgagaccttaggctcaataattagtcatggaacttcctggattgctgaaatcatccactggataatttcacctaacgtccgtactcacctaaagaaagtttataagaagaatctgaaaagagaaccatgcggttctctttttgtgtttacgttaattcattaaagtcccagatttggtccatccatccttcataaaagtccggttcgtggcaaaccatgaggatcgatcccttgtattctttcagagcccgtttcaattcatctttggcatccacatccaagtggttggttggttcatctagtaccaagacattgttttcacggttcatcaagagacagaagcgtaccttggcttgctctccaccagataacacctggatttggctctcgatatgcttggtggtcaagccacagcgggcaagggcggcacgaacttctgcttggttgagagccggaaaggcattccagactgcttcaagcggtgtttgacgattgccaccttcgacctcttgctcaaaatagccaagttctaaataatctccacgctcgacttcaccagcgattggtgggatgattcccagcaagctcttcaagagagtggttttcccgattccgttagctccgatgatggccactttttgattgcgctcaaacgttaggttcaaaggcttggtcaaaggacgatcatagccaatttggagatccttagcctggaagataaagcgtccaggagtccgggcatttttaaattcaaaggatggttttggtttctcactttgcaactcaatgagttccatcttgtccagcttcttctgacgagacatagccatattccgtgtagccacacgcgccttattgcgggctacgaaatctttcaaatcagcaatctctttttgctgacgctcataggccgcttccaattgcgatttcttcatttcatagacttcaaggaattggtaataatctcctgaatagcgggtcaactgctgattttccacatggtagacgatattgatcacatcgttcaagaatggaatatcgtgggaaatgaggacaaaggcattttcataattctgcaaatagcgcttgagccaatcgatatgctctgcatccaagtagttggttggctcgtccaagagaaggatatctggtttttcaaggagcaatttggccaagaggaccttggtccgttgcccacctgacaaggaggtcacatctgtgtccatcccaaagtccataaccccaagagcacgggccacttcatcgatcttggcatccaaggtataaaaatcacgactttctagacgctcttggagttctcctacttcttccatcagagcatcgacatcagctccctcttccgccatggccatatagaggtcattgatgcgagcttcagctgtgaacaactcatcaaaagcggtccgtaagacatcgcgaaccgtttgtccttcttctaagaccgaatgctgatctaggtagcctgccgtcacatacttagaccactccaccttgccttcgtctggttgcatcttaccagtcacgatgctcatgaaggtcgatttcccctcaccattggccccgacaagaccgatatgctctccctttagcaaacggaaggacacatcctcaaaaatcgcccggtccccaaaaccgtgactcaaatttttcacttctaaaatactcatgcttgactctctttcattgatttcactcgtatgattatatcatcttcactgcaaaatgaaaagggagcccaactcccttttcttttacaaacctaagtctgcgtatggtttccggtagcccacttgaataacttttccgtctttgacaagcagaggccgcttgatcagcataccatctgaagcaaggagatccgccgcttctttcactgtcagttgatccaccttatccttcaaaccgagttctcggtatttcattccgctagtattgaagaaagacttgatcggtaggccagaagctgccatccattcttgcaattcttggctagtcggtgtttctgtgacgatgttttggctttgaaactcacattggagaccgtccaattctgatttagcctttcgacaagtcgaacattttgggtattcaataaaggtatacatcggttttatttctccttccagataattccttcatggtgtaagagccagcgtttgcgatcaagtccagacgcatagcccgtcagttgtccatcttttcccatcacacggtgacaagggactaagatcgtcaagggattgcgtccgacagcctgtcctacggcctgggctgaaccacaagaaagatcctgggccagctggccatatgtcttggtctcaccatatgggatctctcgcaataactgccacacccgctcttggaaggctgttccttgcggtgctagtggaaaactgatagcgattggatctcccgcaaaatagtggtccaaccagtccttcaccttctcatggtagggatggatctgctccagcgccccatagggatcaggcgcctcctctttcggatcataaaaatcaagctctacaaggccttccttactgacaatgatcgaaagaagccccatagggctttcataaaattgtttaagatagagagtcattataggccgcttctgctctttggtcccagcggtcctcttctgagaccacttggaatagactcgtttctgcttttcgtttgatcttttgataagccagacggactccatcaatagggacctttccacaataatggtagcccaatttttcaagcaaatgttgcatgaccagattatccgggtgcgtatcgcaacggaaatccggccctttttctccttcgattaaaccttgaaggaaggtctgagccacccctttgccagcagcttctttggctacagcgacgcggtgaaaagtgacatacatatagttgtcatgctcccacttgccatcgtaaatctcattataagccgcttcatttcccttgtagacggttgcataggcgacgacttcctgatcttcaaccgccacatagccacgactttctagaatatcctcaaaaatgatctcttcatctggatagccatcctgccactggtcgacctgtctttgagccagactttccttggcatcttggatgatttccataattcgcttaatctcattgggataagccattctaatttccatcctgcttccaacctttcctagtcttgatggtatcgagcatagagctcactcttttgcaggccgtattgtttggcgacctgtttaattgcttgatttttcttcatgccctcttggaccaaggtatcgatctcttggatcaagtcgacctcttctaggtctagttcttctttcttggctccttcgacaatcaagaggcactcccctttgaggggattttcttcaagaaatgcgactaactcagaaatactgccacgagtatattcctcgtagatcttggttaattcacgaaccaggacgacaggacgatccccatagacagccaacatattctctaaggttgcctttactcgatgaggcgattcataaaagatctgggtctccggataggccactttttcttggaaaaaggccttctgttgcccctctttgcgaggcagaaatccataaaaaatatgaggttgaggggctaggccactggcaatcaaacccgttatacccgcactaggaccaggcacagctacgacaggaatctctcgtacaatcgctgccttgaccaaatcatgaccggggtcagagatactaggaagtcctgcatctgagacttgcgccacatcctttccggattctaaatgggcgatcagatctggaattttctccatggcattgtgctcatgaaagctggtctggggtgtcgtaatctcaaaatgcttgagcaagaggcctgtatttctagtatcctcagctgcgatcaagtccacatcctttaaggtctggaccatgcggtaactcatatcctcccggttaccgatcggtgttgggaccaggtaaagcaccccagttttcttttcccctttaaaacttcgttggatctgcatgcttactccctaaataacaactcgtcacaaaacatacactcttcatcgttctcacggcgttgaccgtaggaataagtgcagatatgaaaaccgtcgttgtaaatacgttgcaaattttcacggccatggtgttgtgactttgcggatgaagtcttctcaacttcccccaaacgctctctcaatttatcattttctaaacgaagagctgtattttcttcgatgacttgtttcaaatttttcttgatggcttcgacttcagccaaggtgaccaacaaattctgagagaagccgtctaaagcatcaaataattcttttttattcattctgactccttaactttctaagctcaaaaccatatattccagagcattttgaaaagaaacattagccttccacatcctgcgagcaagactcaattttcccagtagctgctgggatctgttcaagcgcaactgctcttctaaagccaactccatcaaacgaaaggcctggctttgtttttccttatcatctgctaaactcaccaatcgagttacttccaaataggcacgattcaaattggattgacaacgttcgatgaactgatcacaaactttagccaattcaaaaaacgtagcattctttttttgctgctctgcctcttcgagattaaaactaaaacgagctactaaatttgcttgtgatttaatcaagccttctttttctagcagttctgttaggtaggcttgctttttaggaaaatggacctgctgggcccgactcttgatggtcggtaagatcaagttttcatcggatgtcaacaagaagagatagatctcactctggggctcttccatgacttttaagagagagttggccgcattggtatgcatcttatccgcatcttggacgataaagacctgccggcttccttcaaaccctgattgagaaaagtcttgaaccagcgagcgaatacggtcagtcttaatgatctggttgaccggacgcacgatcttcacgtctgagaattcttcttcagcaatcaagcggcaggaccggcagttgccacaaggccagactccctgcaaatcttcgcaaaattgactttgagctaacaagagggccatctcaaaactggcaaaagagcctgtaaagagataagcatgactgagctgtttgtgttctaagatctgggtgaagcgctccaccaattccggctggagctgttggatctcttctagcttcatttcaatatccccaagcgagtttctaaaacagccaagacatccgcaaagactgcttcaaaggattgactggcatcgattttcacaatgcgctctggttccttttcatacaaggccaaataaccttgtctgactttttggtgaagctccaaaccttccaaatctaaacgattgacttcccgctcttggtttttggcaattcgagcgagcccttcttcgacatccagatcaaagtaaagggtgagatctggtttaagaccatctgtcgcgaattgattgagccactcgatatcttccacactcaaaccgcgaccatacccttgataagcgaccgagctatcaataaagcggtccatcaagacaaccttcccagctgcaagggctggcaagacacgttccaccaaatgctgccggcgactagcaatatagagcaacaactcggtcttggcatccatacgagtatggtctggatctaaaatgacttggcggatcttttctgcaatgtctacaccgcctggttcacgggttgtaataaaaggaattcctttttcttcaagtagaggcaaaacggcttctaggaccgatgatttccccgctccttctggaccttcaaatgaaattaatgtaccgtttaccataatatcctctttctagttttctactttttattttaccaaaaataagggtaaaaatcttgtattttaggagagaaaatttttcaaagtcattttcattttttcacttttttgttacaatgttcttataaagttttaggagacaacctatcatgtttaaatttaaagatattctggctatcatcttgggggccggcattttttcgtttgggatctattttttggtcattccctttcacttctatgaaggaggagcgacagggattaccttgatcacctattacctcttaaaagtccccgtatccctgatgaacttgctgatcaatatccctcttttcattctggcttggaaactgctgggcaataaatctctttacctgagcttactggggactttctcggtttccgcttggatggcgatttttgaagcgatacccctcagccaccgctaccatcacttcatctttaacgcctttaaaggagatattctgcttgcctgtatcgcctcaggggttgtacttggtttggggctagggattatcttcaatgctggaggaaccactggaggaacagatatcctcgctcgcatctttaacaaatacacttccctcagtatgggaaagctcatgttgattgtcgatgccattgttctgacaactgtggtcattgtcttccaagatgtccgtacagcgatgtataccctcttctttatcctgattgacacccttgtgattgacttgattggagaaggtggttttgctggaaaaggcttccttatcgttacctctaaaccagaagaaattgccaaaaaggtatctgatgatctgggtcgcgggattacctttatccgcgggatgggctattacagccgtaaagatctggatatcgtctactgtgtcgtttcacggaatgagatgaaacaaatgaaagacatcatcaatcagatcgatccattcgcctttatcaccatttctgaagcccatgaaattctcggcgaaggctttactttagataaagaaaaacaacccattacccgttaatagaaaaaatcagactggattgccatccagcctgattttttctattaaatagcttttgcggttgttcgagtaatttcatcgactttcaaaccgttgacttcaaatttactacggattccttctagatctgtcaccccatcaatttgaacttcgataaccacacgatcgtcttttgttgggatattgactgtattggcgatgttatatccttcttctacaatcaagtgaatgatttgttctagaacgccaaccttatcttctgtcacaaagcgaacacgaactccttcttctccataaccggatacttcaaggaaagcacggaaaatatcacggtctgtgatgacaccggatacttggtcattgtccacgactggaagaattcccaccttgttcttatacatgaggtaggtcgcatcttctaagctcgcaaatttagagacggtaatgacatcgcgaagcatgacatctttaaccttggtcttgttcaagagatagttcatctcgaaaatagacaagcttgttgctttagatggacttgcttctgcaatcgtaccttctgtcaccaaaccaaccaatttatcgttttcaatgactggcaaacggtgcaaaccttgttcgcgcatcaaatctgccgcgtgggcaattgtagtatctggactaatgtaaaccactttacgtgtcataaaatctttaacagccataacaagttctcctatgcttttattagttttattatacttgattttaagaatgatttcaaacgctttcagcagttttctcttgttttcaaaatttagaaaaatcaaacaagagagatgaaaaaagaaaggtcttcaggacctttctttttgacattctagtgaactttagaaatcttatccaccaaggtaagccttgcggacttcttctgaggctaagagttcttttcctgttccggtaagaacgactttccctgtttccaaaacataaccgcggtctgcgatggcaagagccttgttggcattttgctcgatcaagagaacagttgtcccttgtttttggatatcttggatgatatcaaagatttcttggataaagattggggccaatcccatagaaggttcatccagaagcaagagttttggcgttgacataagtgcacgacccattgctagcatttgttgttccccaccagatagggttgctgcatcttggttcttccgttcttccaaacgtgggaaacgagaaaagactttcttcaagttagcttgattttcttctcgatctttcttcaagaaagctcccatctccaagttttccataacagttaagcctggaaagacgtggcggccttctggaacttgagagagtcctgctgctacaatcttttgagccggaaccttttgaatctcctgacccaaaaactcaattttcccagcacttggacgcaccaaacctgaaatggtacgaagaatagatgttttcccagcaccgttagcaccgataagagaaacaacttccccttcgtttacctcgaaactgacatcacggacagcctggatcatgccatagtgtacagaaagattttcaacttttaacatagacattaggcttcacctcctagataggcttcgattacgcgtttgttggtcttgatttcatctggcgtaccatgggcaatcaagcgaccgtattccaatacataaatccgttctgttacttccataaccaagctcatatcgtgctcgatcagcatgatcgtaatattaaattctttttgaatgcgacggatcaattgggtcaattctgctgtttcttgagggttcatccctgcagcaggctcatccaagaagaggatttttggctctgtagcaagggcacgaacgatctccaagtgacgttgttgtccgtaagctaagtttttggccaaggtatctgcttctttttccaaaccaaaaatcgctaacaattcaagggctttcgctttcaaagcttcttcattcttgtaatagcttggcaagcggaaaagactcgcaaagacatgtggtttatggtgattagcaaaggcaatcaagacattgtccaaaacgctcaaatctttaaagagacgaatattttggaaagtacgtcccagaccacctgcagcgattttataaggtgctttaccatttagtagctgaccatctaaggtaatggtcccttcacttggttcatatacccctgttaggaggttgaagagggttgttttcccggcaccgttgggtccgatcaaaccaaccaattccccttcattgagttccatggtcacatccccaacggctgtcaaaccaccaaagttttttgttaaattttttacttcaagaagtgccattagttagcctccttttttgagagtagttttttcaagctgaattcccatgttccaagaagaccacctggacggaagatcatcacgagaatcaaagccaatgagtaaatgatcatacgtacacttgagaagtcttgaagcaccatgttcaagatacccaagacgatggctgccacaactgttcctgacattgatcccaaaccaccaaacacgacaatgatcaagacattaatagtattggtgaaagagtaatctttaggaacaacagagccgataaagccggcttggagagatccagcaatcgccgctgtgatcgcaccaaatacaaaggcaatgactttgactttggtcgtattgatcccaacagattccgctgcgatttcatcttcacgaacagaaagggtagagcgcccaattggactacgtaagaagttaatcgtaaagatcgttgtaatgacaacaaagaggtaaaccaattgccaagttgtaaaggctggcaaaccaaggatcccagcagcaccatttgttagagtaccaccattaacgatcaagatccggatgatttcagaaaccccaagtgtcgcaatcgcgaggtagtcccctttcaaacgaagggttggaaccccaacgatcaaggcaacgacaccagcaatcaaagcacctaaaaccatcgcgacaaagaaagccccgtaggttggtgatttggaaccgagaatagctgcagagtaggcaccaatcgccataaatccggcatgcccgagtgagaattgacctgagaaaccaacaatgaggttcaagccaactgcaaggataatattaattccgatttgttccaaaatttggatatagaagaggttgagcacacctgctgcaaccaagacttggattaagacaaaacctgcgaccaaaagaccaagccagactaaattcacttttaaattttgtttcatggcttacaccttctctttcacatttttaccgaggatacctgctggacggatgagcaagatcacaatcaagatggcatacacaatggcgtcacggaagtctgaaagaccgatcgctgtagcgaaggtttctaacaaaccgataacaaatccacctagggcagcacctggaatgattccgattcctccaagaacggctgcgacaaaggctttgatccctggtgtcatccccatcaaaggctcgatcgagttgtaatacaaaccaatcaagacaccaccagcacctgccaaggctgatcccaaagcaaaggtaaagctgatcgtacggtttacgttaatccccatcaattgagcggcatcactatcgacagatacagcccgcatggctttccccatctttgtcttttgaataataaattgaagagcgaccatcaagaaaacagacactcccaagatcatcaactgaatattggagattgaaataggaccgaagttgtaacgaaccgttttaatcacttgcgggaaggaacgggtattggcccctacgaagaagaccatcccatattcgagcaagaaggaaaccccgatggctgtgatcaaggctgcaatccgagtcgaatgacgaagaggacgataagccagatattcaattacaacccctaaaatagctgtcccaaccatggctaggagcaaggctacaaagaagttcactttccacgagttcaataagaaatatcccataaaggcacctaccatgtagatatccccatgggcaaagttgatcaatttgataattccatacaccatggtataaccaagggccaagagtgcatagacactccccaagattagaccgttcactaattgctggagcatttgaaccatcctttctaacaataaagagcgaggccaggaattttcattctcccagcctcttgtacaaacaacaaatgataattatggtttaacagactcaactgatttgactttaccatctttcaagccaatcataagagctgatttaaccgggttgtggttcttgtcaactgacattgtaccagtcacaccttccaagtctttcaacttcgcaaggttatctttcaattcgacagagttcttagcacctttagatgcttctgcaaccatataaactgagtcataagccaaagctgcgaacattgaaggttcttcattgtatttcgctttgtaggcttctacgaatttcttggctttatcagtcatttcaccttcagtagagaacccagctacatagtagatatctgtagctgcagcaggtgttgcttgttcaacgaatttagcatcgctaaatccatccccaccaatgattggttgtttgattcccataccacgcgcttggtttacgatcttaccagtttctgtgtagtaacctggaagaacaatcgcatcgaagtctttatctttgatttttgtaagggcagcttggaagtctgtatccttagattggaaggtttctgttgctacgatttcacctttgtaagatttcttgaaggcttcagcaatccctttcgcatagtcagatgagttatcgtagtaaagaacgactttcttcgctttcaagttatccgtggtgtatttggcaatgatttttccttggaagctatcgatgaaggttgcacggaagaggtattcttgaccttttgtcaaatcatcttgagttgcagatggtgtaaccaatggaacacctgctttaccagcattggcaaccgctgctgcagtggcacctgaagttgcaggtcctacaagagcatttacttttgattgagtgacaaggtttgtagtgactgtagctgcttcagctgtttcagatttgttatctttatctgtgacaacgatcttcttaccgtcagctccacccttagcgttgatttcatcaacggctaattgagcacctttttgttcggcactaccgtaggctgctacttcaccagttttttcaaagttaaaaccgacttttagttctttgccgatttcgttaccggttgtgtttgaacctgaagtagaaacttcaccacaagcagcaagaagagcgacacttgcaatggttaaaaatgaaagagcaaattttttcttcatttgtaatgatctccttaaatgaatcttaaaataaatacattaagaatataccgaattatctgacaattgtcaataaaaaaagcgcaatccatcaaatgattgcgttttctatccttctgtgaccacagatggtgcctccagtcgttgcaaactccccacaaaatctgtatctaaatcattgagatgacaaggcaagacctttttgacataacgttctttctttaagtcttccatgacttgatcggccttatcgctgtccacatacaattggacataacggcatttcttagaatggtacaagacatctccgacagattgtaattttttcccgtctcgattgtaatacaatttaacaatcaagcctgttctttcttgtttctcaaacatggtcaatccctttctcattctgttactagtatatcaaatttcaagaaaaagaactactcttttatgagagcaaaaaagagagtgggacagaaatcggtaattcgttagaattcgatttcgtcgtcccacctccgcacagttgagtagggctgtaaaagctgatgaaatcagcgtagtagagcccactcaaccactgcgttttgctcgacaatccaaaaataattgagaggctaggacttttgtcccagcctcttgacggaccttcccataggatggtttagtccaatttattattggccatgatttcatcaataaagccatattcaagtgtttcttgcgcgctcatccaattgtcacgttcggcatcagcatgcactttttcaatggattgacctgaattgtccgcaaggattttttccaagttattccgtgttttgagcaagtgttctgctgcgatcgccatatcggtttgttgggtaccaccaccagtaccacccattggttggtgaatcatgtactctgcatttggcaacatgaagcgtttgcccttcgcaccgcttgaagcaatgatagttcccatagaagccgccatccccataacaatagtttggacatctgacttgataaagttcatggtatctacgatggcgagacctgcagagacagagccacctggagtattgatatacatatagatatcttttgtattatcttgggcatccaagaagagcaattgagcgataatggagttagccatttggtcctcaactggtcctgttaccatgataattcgatctttcaacagacgggaataaatatcgtaagaacgctctccacgactggtttgttcaataactactggaatcatctattcttctcctttagtatccattcattctcacgattcgtgaggttcaaagtatatgtgctattataaaccaatggtcaaaaaaggtcaaatctaaagcacctttcggacttataatgaatggtttctttatttggtaccgaataaacggtcacctgcatctccaagaccaggaacaatgtagccatgttcattcaaatgatcatcgagagctgctgtaaagatatcaacatctgggtgagcttcttgaagagctttcaccccttctggcgctgataccagacagacaaacttgatatggctagcgccacgttttttcaaggagtcaatagctagaatagcggatccacccgtagcaagcatagggtctactacaaagatgcgacgttgatcgatatcttctggcaatttcaccaagtattcaactggtttcagagtttcctcgtcacggtacatcccgatatgtccaaccttagcagctggtaccaagctcaagagaccatcaaccatcccaatccctgcacgaagaattgggacaatagccaatttcttccctgcgatttgtttttgaaccgttttagtaataggagtttcaatctcaacatcttcaagaggcaattcacgcaaaacttcgtagcccatcaacatagcaatttcatctaccaattcacgaaaggccttcgtagaggtatccgtgcggcggagaatagacaatttgtgttgaatcagtggatgtgtaataacttctaattttcccattttgagatccttctttctaagctgttattattcaaaaaagagccatgataaaagtggagtcaagctctactctttctttcagtccctctttgatactcacagcacatggaaatcttcatttccaactttacattcttcttattataccaaattttacaaaaaaaagagagcccttacacttaattttttaagttcggactcactctttctacaaataaattacaaccattctttgtatttcttaatatagatacgtttgacaaccgtcacactcagcatatagaagacgataatagcaaacaatagaacaaagtacaatccatttagttggctcaacttcaagatagaagccaaaggactatatggaagggaggttacaaagaaggctgctactagggtcgtcaccacgactgagaaggctggacgactttggataaatggcagttttggtgaacgcaacatatgaataaccatcgtttgagaccacatggattcgataaaccatccggtttggaaaaccatgataaaggttgctgcatctactgctccatggttgtacccatgacctaaaatcattgggacaacaaggaagtaaagaagcatgtaggtaataatgtcaaatacagatgaaattggaccgatccaagccatgaagcgcatgatggaatttgcttcccagatacgaggtttcttaaggaaatccttatcgacattgtcaaaaggaagggcgatacaggaaagatcatagataagattgagcacaatcaaatgaactggcgccattggaaggaagggtaaaaagatgctggcaaagagaagagaaaagatattcccgaagttagaagagaccgtcatcttgatgtacttggtcatattggcatagaccttgcggccttcaaccaaacctttttcaaggaccatcaagtccttatccagaaggatgacatctgccgtttctttggcaatatcaacagcggtatccacggagatcccaacgtctgagaccttcatagatggagcatcgttaataccatctcccatgtaaccaaccttgtggccattattcttgaggcagaggatgatccgcgctttttgatcgggtgatagtttggcaaagaccgttgttgtttccacaactcgtgctaactcttggtcagtcatcgtatcgatttcgcttcccaaaagaatccgctcgacatctagtcctactttttcacagacagcttgagtgaccttttcattgtccccagttaagatcttggtggttaccccatattctgcaagagctttgatcgctggagctgcagaaggttttggtggatcaagaaaggccaggtaaccggttaggatcatatctccttcatcttcaacactaaagatgtcattttcgtccaagtcagttttgtagctgactcccaaaacacgaagtccttgttcatttaattgagcaacttcagcgaggacctcttgacgcacttcatctgtcaggcgtttaatctcccccttgtattcaacaaaagtcgatacagaaagcatttcttccaaggcacccttggtcaccatgctgaccacaccgtcttcgtctttgacaatgacactcatgcgacgacgttcaaaatcaaagggcaattcatcaatcttatggaaggtttgatccagatcgcgaacaatctcatgtttcttggcttctttctgggtccgattgataatcgcccggtccatcaaattttttagcccggtttggaaataggaattcaagtaagcccggcgaaggactgatagatccaaatcgccatggatatcaagcggatactccaaaacgatttcatcctgggtcaaggttcctgtcttatctgtacacaaaatatcaatagccccaaggtcttgaatggcattgagttttttgataacgactttttccttggccatgatgatggagcccttcgcaagactcgctgtaataatcatcggcagcatttcaggagtcaaaccaaccccaacgctgagggcaaagacacctgcttctaaccagtcaccatctgtgagaccattgatcacaaagacaacgggcaccatcactaacatgagccgaatcaagagccaagagatggtattcatttctctctcaaatgaggttggttcgtcataggtgttgatggtttgctcaatagctcccatcatggtttcatcccccacgaccaagaccaaggctgtcgcccgtccggagatgacattggttcccatgaaggccaagctttcactctccaagagactatctggattttgactgtcggcttttctgagacaaaccttttcaacagcatcactttcccctgtgagaccagattgttggacaaagaagtcacgggaatcaatcaagaccacatctgctggaatcatatcgccggcacttagtttgatcacatctcctacgacgatttcatcgatcggaatttcttgttccgccccatcacgcagaacggtcgctgtattgacaatcatacgtgataagttgctagctgctttgtcgctccgcaattcttgaatgaagcggatgccaccagagatcaagaccaaggtcacaatgatgatagaggtcgttggatcctgttcacctggttttgctagccagacattggtgatgaaggaaaccagcgcaatgaccaacaaaatcactgtaaaaggattgatgatcgattcgtagacctttttgatcatggaatcttcttgaccttttgtgatgacattttcgccataaatatcgcggttttcttctacttgatcgtcaactaaaccaagggcactggttttgtaggtggcaaaggtgctttcaagtggttcttgaagagcagcaatgagtctttctttatttgtttgcattggtatctcctttttcaatcaggagccaatcacttttggagtccctacgacacaaatcagcgattggctggttcggtgcggttcgggatgatcgtcgacttgtatcatagctctctcctttctcttttcttggtaaggcataaaaaagagtcctaccctcgatcggtaggactcatgaaactcgtcatttatttttcaatcaaaactctcaaaaaactgaccgtccaagctttagctccgcaaggcaatgaaatgagcttagtcttgacctttgcgatcaggactgttgaccaacgagtagtgtctccactgctttgcggtagtcatccgtatccttgtggtagcctcacctaccgtatttcgagtttattgtactccttcagatacagaaagtcaagttttatttgtgaaaagtatcaactaaacgtttggtaatttcttcaatgagggtgaaaggggcagctacattaaggcgggcatgcaaggttccttcttttccgaaatctgttccacggttcaaaatcaatttggcttggtcatggattttagcatgcagctcatcatcggtatatggataggctgaaaagtccaaccaaagaagatatgttccttggggtttcatcactcggatatgggtcttttcatgcaattcatctacgacatagtcaatgtgtttttcaaagacttgcttgagctctgtcaaccaaggtttaccatggcgataagccgcttctgttgcaatatagcccaagcctgagatttcatgttggttattggccaattgtcgttgtttaaaagccgtacgaagctttggattttcaatgaccacataggaattttttgttcctgcaatattgaaggtcttggttgcactggttaagataaaactgaagtctttaaagcttggatcaaccgtattaaagctggtatgacggtgaccaaacaaggccaaatcttggtggatctcatctgaaacgagaaggacaccatgtttttgacagaggtggccgattttttccaagacttcacgatcccatacacggcctccaggattgtgcggattgcacaaaacatagagtttaacgtcttgctccacaatgtctttttctagctgatcaaaatcaatttggaaaagaccgtctttttcgactaacgaattttcgatcaattttcgacgattgagtttgacacttcgtgcaaatggaggatagaccggtgtattgattaagaccgcatccccttccttggtgaaggcttgaatagctgttgaaatagctggaacaacaccttcgataaagacgatcgcttccttgtcaaaggaatagccgtgctcttctttttcccaatcaaggatagactggtagaggctatccgatgcataggtgtaaccatagaccatttggtcagcatagccgataacagcttctcgtacttctggaatgacattaaaatccatatccgcgatccaagccggaatgatttctggatctgtctctgtttctttccacttgtaggtatggtgggtcaagcgattcggtaaagtcgtgaaatcatatttggtcatcttaagcctccaatgcttgtttcaaatcttcaatcaaatcatccgcatcttcgattccgatggacaaacgaagaagatcatctgtcaaaccgtatgaatggcgaacttctgcaggaatgtctgcatgagtctgagtggtaggataagtgatcaagctttcaactccgccaagactttctgcaaaggtaaagacttgaagggaattcaacaagttgggaatttttttctcatcttgaattttaaaggagaccattccaccttttccagtgtagaggacttctttgacctgaggggatgttttcaaaaactcgaccaccttgcgagcattctctgtggagcgctccatccgaatagaaagcgtcttgagaccacggatcagcagatagctgtcaaatggggaaagaacagcacctgtcgtgttcagattgtaaaagagtttgtcatacaggtctgcctcatttgtcacgacaacaccagccaagacatcgttgtgaccagctaggtacttggttgctgaatgaagaacaatatcagcaccctcttcaatcggacgttgatagatcgggctatagaaggtattgtccaccacgactttggcaccttttgcatgggccaatttggctaaatgagcaatatcaaattccaacatcaatggattggttggtgtttcaatatagaggacatctaccggatcattatctagatggtggatcagttcttcttctgtattggcataggtgaaagagaaacgaccttcttgctcttgttggttaaaccagcggaaagaacctccataaaggtcacgaacggccaagacttttgaaccaacagcgaaaatgctaaaagcaagtacgatggctgacattccagagcttgtcgccaaagcatagtctgcactttcgatagctgccaaagtcttctccgctgttgcgcgtgttggatttttcgtacgggtatagtcaaaacctgtagactgaccaaattctgggtgttggtaagtcgtagagaaatgcaaaggagtcgtcaaagctcccgttgcttgatccgacttgattcctgcctgtgccaagatagtattaatattgcgttttttactcatattgccctccgataaatattcaatctaactgattactattttatcactattatgaggagagcggttttcccatttccaagacctagctatagtttcaaactataagaaaagagagtgggacagaaatcggtaattcgttagaattcgatttcgtcgtcccacctccgcacagttgagtagggctgtaaaagctgatgaaatcagcgtagtagagcccactcaaccactgcgtcttgctagacaatccaaaaataattgagaggctaggacttttgtcccagcctctcaggtttatttcattcggaatttttgtctgagacgtgtggcttgacctccgataaagcggtcaaaatatcgtagccataatcctaaggctccataaatagcaactcctaatccgccaatgacgatgatataaatcatgctccatacacgaccatttggtgggaaaatccagcccaaaatcaagcctgcaatcaagactccaagtagcatcaccacggtcagaatagaaccaagcaaggtgcgcttaaagacgatggttcgattaaactgagtgatggtttggatctctcgatacatgagaacaattggcaccattaacgcaatggtcgttgacaaaagtggtccataagaacgaaagaccaaaataaatggaatttgtaggaccaatttcaccactacaccataaaagaaatagcgaatagccttgcggttttgaaagagggcttgaatcattggagacaagaccatataaagacctaaaataatggtctgcaacatcgctacaatgaagagtcccaatgctaagctatctggttgcccatagaaaaccgtataaagtggttttgcgaccgccactgcaccaaaggtggctggaagcaagaaagccaataacatggtcaagttatcctgtacgagcttcccagcagcttttaggtcatccttcacgtaattctctgtcaaaagaggaattccgactcccccaatcgaagtcgctactgcgatcaagatcatagtaattttgtttggattagcagagaaataactaaacataaccaagagctgtttctgactataatctgtgaaccaggacataatattaataaaggtcatctggtcgacaatttggaagagctggatcgcggaaccagtgatgataaaaggaatggcttcccgtatagtatcgatcaagagtgcccgggtatcaatttcttcactttcctcttgttttttaaaaatagatgagagcaagcctgtctttgcaaggtagtaaaagagaaccaacaagcttgctaccattccgataaaggcagcaaaggttgactgcgtaacagcttgcacataatctccagagccaatcttcataatgaagaaggtcgtgagcaacatccagatgacccgaatgacttgttctgcaatctggcttatagcgtaaggcttcatgttgttaaaaccttggaaaaatccccgaatgacactcatcgaaggaaagatcaagacagcccaagaaaggctctgcatgatcggaatcaactctttccccccacctgaaaggctagcaaagacaggagacaacagatacatgagaatggcaaatccaaggcctagaattcccatgaatttcaagaagccccgaatcaaagcaaaactatgatcggcttggtcccgggtattgtatttggctacttgcttggcaacagctacgggaactccggctgtcgaaatcaagagaaaccaagcatagatattgtagcccattgtaaaaagaccattggcttgtggcccatattttcccatccaaatataccaaggaataatataagcagctcctagcaaacggctgataaagttgctggctgtcatccaggcagtcccgcgaagcatctgggcttgctggtcattttgttcgtgactcattggtgtcctctttcgtttcttcttctcttcattataaacttttccatgacacttgtaaaatagggactttaggtttacaatagttttatgattacaattgaacaaaccctcaacattttaaaacaagaccaaaatttccgagaagttctagtaaatggtgaatactactaccatttagaaggaacacgttttgatgccattagctatgatagccgtaaggtttctgctagcaccctcttttttgtcaaaggggccaacttcaaaaaagaatacctggaacaggctatttctaatggactcggcttttatgtctctgaaaaagattatgaagttgatattcctgccatcctcgtcaatgatatcaaacaggccatgagcttaattgccatggagttttatgggcaccctgaaaaacaattaaaattattagccttcacagggaccaagggaaagacaacatcggcctactttgcataccatattttggaacaaagtcaccgaccagctatgctgtctaccatgaatacaacactggatggtaaaaacttctttaaatcgaccctgacaactccagagagcttggatctttttgccatgatggctcaggcagtagccaatgatcggacccaccttattatggaagtttccagtcaagcttatcttgtgaagcgggtttacggcctgacctttgacgtcggtgtttttctcaacatcagtccagaccatattggaccgattgaacacccaacttttgaggattatttctaccacaaacgtctcctcatgaagaatagccaagccgttgtcatcaatagcgatatggatcatttccaagttttagcggatcaagtagcgaaccaagaccacgatttttatggaagccagtctgagaatcaaattaaaaactctaaggccttcagcttctcagccactggtaagctagcaggcgactacgatatccaactgattggccattttaaccaagaaaatgctgtagcagcaggtcttgcctgtcttcgtctaggtgcgagcctcgaggatatccaaaaagggattgctaagacgcgagttcctggccgaatggaagtcttgactcagaaaaacggcgctaaggttttcatcgactatgcccataatggagatagcttgaaaaaactgctctcagttgtcgaaacccatcaaacggggaccatttcactggtccttggttcaactgggaataaaggagagagccgccgcaaggactttggcttactcttagaagaccatcctgaaatccaagtcttcctcactgcggatgatcccaactatgaagatcctttggctatcgctgaagagattagtagttatatcacgcgacctgtcgaaaaaatcgcagatcgcgaacaagccattcaactggccatggcaacaaccagcaagcctgaagatgccgtcattatcgcaggaaaaggagcggactgctaccaaatcgtcaatggcgtaaaagaagagtatccaggtgatgctgccatcgctgaacgttatctataatcaaacgaaacaaggctaggaagagttcctaaccttgtttatttttttataaagcgcaatttttcacgatcaaaatcaactgccaattcatatttgccttcatcatttttgcggatatagcctaaaacttctaaactatcgacaaagatgtctctgcgcttttgctggacttcttcttttttgaggaacttgagcaaaaagctggtcatatacttgagagcatactcgggattgacatctcccaaaatagcatagagcttttcttgctcctctgtcaaagggtattggtgtttcaccttgtagaagtaattggaaagggtctgtgcatttcgcgcaaagtccgtgtcctctatgagaatcgcttcattggtagtattgcggagttccgtttggaagaccttgtcttttaattcttgataaactgcactgtcctctcggacaaagacctcttgattcaagtcaacaagatcagctgactccaagaagggcaggttgagggtgtagcgtttattttctcgaaggatgaagcccgctttgatatactcttccatcagcttatccactggttgatctggaaattgggccttgatttgccgcaggatcacatcgtcgtgctgatccaaatagttgatcaggtccttgaaaaatggctgacgtgtcaaacgtgtaggattaatgattgtaatcatccaaatacctttctttaaactgtagctgtggtgattgggctaactgactcgggttggtcccggactgatctaaaggaatcgctagaccaatctctctgtagtaatcttcccaaaacggactaatctcctgctcttcatccccaaacttcatgggaatggtctcaaatataggaagtagttcagcaatgaactgggaacagtaataaccatctccatctgggtaaaaggaagcattgtagggagcccctaaaaggctctttgctcgctttttgacatctgtacaatcaatctccgcatagcgataaaggtcatagactttcccatcttcaaagaaatcttcgggagactgggcaaggacaccaccttccaccctagcatgataaatgaaaccgtccaaaaagagagccacatggctatagttgccagtagatgtctggatggcctgtcccatatctgacaggtcctttacaaaaatcaaatcgccattttctaacatggtctcctcctagcaaaaaaggagtcgaaactcctttttaacaatgggcttccccatcaatcattaagcattaaagctttctgtcaactgaggtaccacttgtttcttacgtgaaacggcacctggaaggaaagcatggttgttttcgagtttgaagttgaaagctgcttctaccttatccatgttggcaccaagagccaaaatttctgagtttgagttgacaatatctgtaatcatcaagacaaagtctgagtagccgttagctgcatttgcgacttggatggctgcttcgatttcagcttggcgttccaaaacttcagcgatatcaactgtattgacttgggccacacgaacgttgtttccgttcaattcaaaagtttttgcatcgatatcgatcaattcttctgctgatttgcttgccaagttagtaccagctttgagcatggcaagaccgtattcttccaagttgacaccagctaattcggccaattctggcgcaatgactttatcagatgggtgagtggttggagatttcaaaagaagggtatctgaaatcaaacctgaaagcatcaaacctgccaattcttttggcactgctacaccgtgttctttgaacatacggtatacgatagaagatgctgatccaactggttccaaacgcatgtaaagtgggctagcagtttcgaagttagccacacggtggtgatccaccacaccgtaaacttctacttcagcgatatctgaaacagattgttggaattcattgtggtccgtcaagatgacttgctctgcaccttctgctttagcagatgtgataacgcgtggtgcttccacaccaaaatagtccaatacaaaagctgtttcttcatttggagttccaagagccactgcttctgtatccaaaccataggcttcttttgcaagataagcaaaagctacagatgagccgatagcatctgagtcaggattttggtgaccaaaaacaagaatttttgacatatttctacctctttatttcatttatagattcactctattttaacacgtttttccgtttaaagaaagggaagaacaattcatttcactagaaaaaacagttgggtttgccaactgtttttcttctttatcctttgacccgtttcaggtaatcttggtaactttctgtttccatcaaatcttttgcattttgaacccgttcttttgtcggtggtttcacaccctccaatttgtacggaattcccaattcacgccatttgaattcccccatagtatggtagggcaggatctcaaatttatcaacatttttaagggttttaacaaattttccaagttcgatcaagtcgtcatctcggtccgttaaacctggtaccaaaacgtgacgaatccagactggttttccaatatcagataggtacttggcacaagctagaatgtttttattggtttgactggtcacaaatctgtgtcgttcatcattgatttccttgatatccaggagcaccaagtctgtcactgccatcaagcggtcgaatttttccaaataacgaggtgtattccgaaaaggaagggcacaggtatccaaggtacaatgaattcccaactcttgagccttagtgaaaagagcaatcaagaagtcaatctgcaagagggcttctccaccactgactgtgatcccacctttttggccccaaaatccacgataacggagggcttcttctaggacatcatccactgtccgttcacgggacttgttggtttccattgcccaagtatctggattgtggcagtattggcaccgcatttgacacccttgaagaaaaacaataaagcggatcccaggcccatctactgctccaaaactttctgttgagtgtaccattcctgttacttttccatagtcaactgtttcattttccattgaggaacctcttctcttgaaaacgttttatgattttattataacacgattccatctattttaaagagttgaagcttctttttgaaaagaaactgttcttttcagtagttttcattgtcctagtacagtttccaatatgggactatctgtcctgtattttaggagaaaaaaaggagccagcgactccttttttagatctttcttacaaaacacgttaatgagtagtctttttcttcttgtacaaggcaagactcatcgtagctactgccactccaaaaagagctagatagcttgtttcttgtccagtagatggaaggattttccgcttgcctggtgtcttggtttctgttgttgcctcttccttgtcgtcttgcttctcatcttcgttcttggtgctttctttgctttcagatgttgaactcttttgttcattggcctgagcttgatgagggactagttgagaccctggattcgatgaagaagggctggtttgatccgttgcttgtcctgaattcccttgttgatcatccgccggtgttcctggagtttgtgctccactaaagtcgatttggaccaaaacaggatcatggtctgatgcacgaccgtgttccttcataaaggaagcattgatatggactggttcaaaccttgctttggctgccatgttgtttgagataaaaatgttatccaaaacttgattgcttccacgatagaaataggaatagcgatcgcctgcatcatgttgggccattaagttggttagttcattgcccgcaaggatctgtgccgtggttgagaaatcgtaatcattaaaatcacccgtcaaaacaaaggtggtcttcggattttgcttcaagccttcttggacgaattgatgaatgacactggcttgtgcttcacgagttggcaaggtatgttccactgctggttggcttgccccataaatagcatcatctccgatttttgatttcaagtgattagcaatcaccacaactggttggcctttgaattcaaactcaacggctaaagacttgcgagtatgatcaaacgatgggtcattaggggcaatccgagctggatttttaaccaggtgtcccttgtcaaattgtgctgcttcgttgctagttgctgcctcttttttggctaagctcacgcgttctggattgtagaggattcccaaacgaatattcgaaccaggctttcctccgtcagcgccatctactggagcaacttccgtatactcatagctcttgccacccaattccttgatccgattggctagtttgcgtccactttcaacaccacttgtcgttccgtcatccacactaccattattgtcctgcacttcgatcaaagtaatgatgtctggattgtgaatttcatggataaaggaattggcaatcagcgtcaccttatcctctggggtttcatttttggcattgttggccgagaaattttcaatattgtaggaagcaatggtcagcttgtcctcacttggttgggtttgagctgcttgacgctgcaaaccaccatcttggatcgtcaactgttgagtaggctctaacttataaaagctattccgatacgttaccactcctgttacgtcttctgtaaagtaatccttggcttttgcaacaaactgattcccaacataaatcgggatcgtcgctgtattttgcgcatgtggccgtagattcagacctccaatattgtttaaaggaagacctgtgaaatcttctcccaatacatagatatctcctttgtactggggaccaaggacatgcggtttcttcaccaccgtgagcattccttccaggctttcccaataatctagagcatcagtttctggagcataagcagtcggattaggcttcacctccgctggcatccctgcagtgagattcacagcttctggaagaggggctgtcccatcttttgtgatccaagcatcgactaacatggtcaccgttaaactattcgttggttccttaaaggtcttcccagctcccaaggtaacctcttccatatagccttccttgacggtaccagtgattttaaccttgtcaccgactttcaccttgtatttggaaacaacataaatcccatctgaggtccgactattgccatccgattcaatatcttgggcataaaaaccatagcggtctgttttggtcaccaccgcatttttgatggccactttttggccttcaagtggagagcgttgcgattccccttgaatgtccccgatcttaaccgttttctcctcagtatcgtctgaggaactgctagatgtctcttctttatcacttgaagctctcgtcgtagcttctgtagttgttgttgtagcagaagtcgaactatttgtcgagctttcctcgctgctagtgttcgtcacaagcgctggctctgaagtcgaagctgtgatctcgtctgcaactactgtaagggcactactaaagccccccaactgactagccaataaggtggctactgctaataatcgaatcttttttccatgttctttcatgctattctccgtacataaaaatatttcctcttttattataagggaatgaccttgcgttttcaagcgttttcaaaaatatttttcaaaaagaaaaacacttcgacccaaaaagatcgaagtgtaaaatacttaaactaaaatcgccagtgtctgataaggtttgagaattaccttttcagcaagctctgcatcgtcatagttggacaagagcaagcgccctgtttggtagtcttctggaatcgctacttcgacttcacttccatagaaatgattgagtaccaaaagtttttgaccgtctaaatgacgttcaaaagcgtagatttgttgactatcttccagcgctggcaagtagctaccttctgaaataatcggcatttgtttgcgcaagcgaatcaattctttatagaaggtaaagattggtccgtcgatttcattttcaacgttaatgtctttgtaagatttaccagctttcaaccatggcgtgcctgttgaaaaacctgcattttcagaagcatcccattgcataggcgtacgtgaattatctcgtgacttagcttggataatcttaaaggcctgctcaggagactgaccttggtccaagagcatttgataagcattgatggactcgacatccacataatctgccatcgaatcatagtctggatcgatcatgccgatttcttcgcccatgtagatataaggtgtaccacgtgacaaatggatgctagctgcgagcatggtcgctccttcattgcggaagttcttaatatctacaaagcgattcaaggcacgaggttggtcatggttattccagaagagggcactccaaccacctcgttcactcatttccttgccccaagtatgatagagacgcttgagctcttcaaaatcaaatggagtaatagtccatttttgaccatcttcataatcgactttcagatgatggaagttaaaggccatagacaactcgtgacgctccggtgctgaatagagaacacagttgtcaatggttgtcgatgacatctctccaactgtcataaagctatcatcagcgccgaaagtcgcttcattcatcatgtgaagatagtcgtgaacaatgggtttatccgtataagccggtttcccttcattttcagggcaatctaccaagacttcatctttaccaatcaaattgatcacatcgaaacggaagcctttgacgcccttgtcccgccagaagttgaccaccttgaacagctccttacgaacattgggattgcgccaattgaggtccgcctgtgtcacgtcaaagaggtgaaggtaatatttccccgtatctccaaaaggagcccaggcagaaccaccaaatttagacaaccaatcggttggttggtcctgaatgaagaagaaatcttgataatacttatccccagccaatgccttttggaaccactcatgctctgttgagcaatggttgagcaccatgtctagcatgaagtcaatcttgtgctctttcccgacacggaccatttcttcaaagtcagccatatccccaaaaacagggttgacggctgtatagtctgaaatatcatagccattatcacgctgaggacttggatagaaaggattgagccaaaccatatccacacccaactctgctagataaggaattttttcaatgatgcctctgaaatcaccaattccatttcctgtcgtgtccttatatgattttggataaatttggtatacaacctttgttttatctaatgccatttatttaacctcttttttatcaaagggtggaccgtaacgtctccaccccttcgcttattttgttcgatgagcaatcatgagaacatcaccacgtttgacatcacgtggaagatcctcttctacatctgcttggaaatcatcttgattggtaatgataacgggagtctcagtgaccaaaccagcttctttgataacctccatatcaaagctaatcaattgttgaccaacaacaactttatccccttgagtaacgtgagcctcaaacccttttccatcaaggctaaccgtatccataccaatgtgcatcaatagctccacgccttcttcagaaacgataccgactgcgtgcttggttgggaagaggactgtcactgtcccattgactggtgaaaccaattcgccatggctcggttcgatgacgacaccttgtcccatgacacctgatgagaagactgggtctgtggcttggctaagtggtttcacttgtccagcaagtgggctcaccagttgggctgtgtttacaagagctgttggttctgcatgaactgcaaattctgcttcttcttgagccgcaaattctgcttgaagctctgtgctatcttctgtctttgtgaagagaccagccttgcggaagaagaaggtcaaagccataggaactactacagctacaaccataatcattgcgaacggcaacatatattgtggttgaatggatagaatacctggtagaccaccaatcccgattgattgtgctgtgatgttaaaggtaacagagagaagtccagcgatcgaagaaccaatcattcctgctacaaatggatagatgtacttgacattgaccccaaaaagggctggttctgtcacaccaagataggctgaaattgttgctggaagagaaatctgagcttctcgttcatcatgacggtgcatgaggaaataagcaaaaacagctgaaccttgagcaatatttgagagggcaatcattggccagagacctgttccacctgcgtccgcaatcaattgggtatcgatggcattggtcatgtggtgaagacctgtgatcacaaatggcgcataaagagcaccaaaaatagcaccaaagagccatttgacaggtcctgttaaaccagcaagaacaacggttgacagaccttgaccgattgaccaaccaattggaccaagaaccgtatgggccaagataagggctggaatcaaggacaagaaaggaacaaagatcatggacaccacttctggaatgtgtttgcgccagaagatttcaaggtaagaaagggacaaaccagcaagcaaggctggaatcacctgcgcttggtagccaattcgattaaccgtgaagaatccaaagtcccacacccaattcttagcaatttctgcagcaggtgttgaagcaacggaataggcatttagcaattgtggagaaaccaaacagatccccatgacaattcccaaaatttgactggttcccatcttacgagaaacagaccaagtgatccctacaggcaagaattggaagatggcttcacctggtaaccagaggaaatggttaattcctgcccaaaattgagaaacttctgtaatggacttaccatttaacatcgaccaatgcacgccctcaaggacattacggaaaccaagaattaatcccccaacaatcaaggctggaatgatcggcgtaaagatttccgccaaggttgtcataacccgttgaacagcattttgattgctcttggctgcagatttagctgcttcttttgagaccccttcgatcccagatacggctgagaagtcattgtaaaaaattggtacatcgtttccgatgatgacttggaattgaccggcattggtaaaggttccttttaccgcagggatggattcgatggccttaacgttggctttcttctcatctccaagtacaaagcgcatccgcgtcgcacagtgggtcacggcagtgacgttttctttgcctccgattgcttgaagcagatccttggcttcttgttcaaattttcccatttgatacaccgctagcctcagctagcatctccttatgtttatttgttgatctctatcaactgacaaaaccaattgtaaacggttccaaacttgtctgcaacttgtttgtggttattttggtatttttttgataaaatttagggtgttgtatgtaaaaaaacagacaagtgagtccaaatcatgaaaaaataccaacaaatctatcaaattttaaaagaacaaatactagaagaaaaatatctagtcggggattttctgcctagcgagaacgacttaaaagagcactaccaggtcagtcgagataccatccgtaagtccctcaagctcttgcaggaggaaggctttatcaagactgttcaaggaatgggatcgcaaatttgtaggcaagctcactttgaattccctgtttcccaattaaccagctaccaagaaatcgtcaaagcttctggtcttcgctcagaaactaatgtcattcgtttggaaaagatcagtattgatgaaaaaggagctaaaaagacaggcttcccccttcaccgtttggtttggaaagtaacccgacaacgggtagtggatggcgtcgcttctgtcttagatattgattacctagacagagagctgatccctggcctgaccaaggaaattgcccagcactctatctaccaatatatagaagaagtcttgaaattgcagattggctatgcaaagaaagaaattttgatttcaccaatcgataatcgcgacaaaatcttactggatcttggaaaagaccaacacgtggtaacggtccgttcccaagttcacttagcagacggacgccaattccagttcaccgaaagccgacacaaattagacaagtttcattttgtcgactatgcagagcggaggaaataaaggaggctgggacaaaagtcctagcctctcaattatttttggattgtcgagcaagacgcattagttgagtgggctctactacgctgatttcatcagtttttacagccctactcaactgtgagaaggtgggacgacgaaatcgaattctaacgaattaccgatttctgtcccactatcttttattttatcctaataccaattcatcactcaccagggtttcaccactgttttgttggaaaaggcgcatcaaatcttcaaccgttaggtttttcttttcttctcctttgacgtcgacaacgattttgccttggtagagcatgatcaagcggttgccgtattcaatggcatggttcatatcatgcgtaatcatcaaggttgtcaaatcatggctttccacgatcttttgtgtcaattccatgaccatttcactagtcttaggatcgagcgctgcggtatgttcatccagaagcaagagtttgggtttgaccaaggctgccatgaccaaggtcaaagcttgacgttgcccaccagacaaatattgggtatccaccttgaggcggttctctaaaccaatatttaattccttcaaggcttcacggaataattcgcgatctttctcccgaactccccagctcaaaccacgagatttcccccgtcgttgggcaatggccatattttcttcaatggtcaaacgggaagctgtccccattttaggatcttggaagacacgcgcaatatctttcgcacgcttacgaacactcgtatttttgatggagttaccttctagcaagatatccccttcatccacaactagatttcctgccaagatgttcatcaaggttgatttcccagctccatttccaccgatgaccgaaatgaagtccccttcttctacttggagatccaagccttttaagacatggttttcattgactgttcctgcttcaaatgtcttatgaatgccttcaattgataataatgttgccatacttttctcctacttatttcctaacttcaatccgcgaacacgaagacgtttttgcgcctcaggagcgaacaagacaatcgcgagcaagatcgcattgaagagacgaaccatattttgatcgagatttgggatctcataaatatttaagataatcaaacggtaaacaatggctccaaccccgatggaaagcaagcgccaaccaatggtcaattcgtggatcaaaacttcagcgataatcacagcactcaagccgactacgatcgtccctgtaccagaagtcacatctgagaaaccatcattttgtgcaaacatggctccacaaagggcaatcaaaccattggaaatcatgtagcccaacatcttcatgttatctacattgaccccattggcctcactcattggaatgttatcaccagtcgagcgcaaaaccaatccaagttgcgtcttcattaagagagttaacaagatacagacgatgatcaagcaagaaatgctaatcaaaaagacagcttcttcattggacaagcccaatttcatgacacttttgaaaatggtactggcatcgccaatagagaggttgggtactccccccatgattttaatattgatagagtagagaccggtcaaagtaacaatccctgtcaaaagggctggaattttcatttttgtatggagaatcccagaaaccaatcctgcgatcatccctgctaggaagcccaacaaggttgcaagccaagggtttcttcctgcttgaatttgggaagctacaactgctgccccaagtggaaaggcgccttctgccgtcatgtcggcaatatctaaaattcgaaatgttaagtaaacaccgatcgccatgatcgaccacaataaaccttctgataaacttgataaaacgaaattcatctcaaacctcctatttttctaccttcaacaaactaatatcaattccaagctctttagccatctctttattggtatgcaattctaatttttcaggtgtttcaactgcaactttgccaggtttctcacccttcatgatgcgaatgaccattcgagcagcttgtcttcccaattcctcataatcagtaccaaagttgtacaagccaccagtagctaccatttcagcagatccaccaaaaactggtaccttatgactaatcgatacctgttttacagtttctattgtagaagagataatattgtctgtcggaacaaagacgatatctgcttctgacatgatactgtctgctgcagctttcacattgttactatcgagaattgttttttcaaccacttgatagcctttagcttcaaggatcttcttcgcattgtctttttggacaactgagttaggctcactttgcgtatagaggatcccaactgttttcgccgttggaagcacttgcttaatcatgtctacctgtgtagagatcgcatcttctgactggtcacttgtccctgtgatattgccaccaggctctttcaagtttttcaccaatttcgctgccaatggatcggtcacagctgagaagacaaccggcgttgttttcgtcgtattagccaaactttgagccgaaggggttgcaatcgcaaagactagatcactttcttccgccaattgtttggaaatgtttttcagatttcgttgctccccttgagcattttggaaatcaatctgaatatttttcccatccacatagccctctttcttcaactcttcgataaagcctttacgtgttgcatcgagcgacttatgggtgatgtactgggaaatcccaattcgaaagacattatcctttttagcatccttcagatggtgtaaggtcaccaatgatgttaatagaagtcctacaaccaggacaggtgctagtaatttcttcactactttcattttttgactccttttctgcaaataaacaaaaaatccgcttagatcattctctaaacggatgcttgaaattctccaacaagttacaaaacctcggtccatttagatactagctctatggaccatcatcaaaaatcttagccacatagatacaaacaaattgcttgggttgtttgcatccatgagatcatgtctacaaacactatctaaagtagctaaagtaaaatttttgagttgaaatggcttgttgcttcatgtttattttctgctttctttatttatgggtattatcttaccttaattttttttggctgtcaagactatttcagaaatttttaaaattttttgaaaattcaactagccctgacaagaaaaaaacagaggctggaacacgtccaggcctctattttctaatcttcttttgatttggtttcttcatcttcttcgacgatttcagaaatttcaactttcaccttggtcacacgaccgtttttcaccttgtcattagtcaagatcaagtgtttcttttgactatcgacttcacagctgaggcgttctttcaaggatggaatccgcccaacttcagtcaaataataccctgcaatagtatccacatcatcactttccaactcaacgccaaagtattcattaaagtcgtttagtgacatagctccttgcacgacataagtattatccccaatttcaaaaacatcaatttcagctttgtcagtctcatcgtcaatttcaccgacgatttcttccaacaagtcttcgagggtaaccaatccagacatcccaccgtattcatcgagcagaatggccatttgattttgcgtattacgcaattccttcaaaagatcatccacaaaaatggtttctggaacaaacaaaggttcttgtaaaatctttcttaagacaatattatcaaagccattgataaatccttcgttcaagagacgtttggtatggatgaggccgatgacattgtccttgtcatcatcatagacaggaatccgtgaaaagttttgcttgaggatactttcaataatttctttggtatcatcattgatatcaaccatgaaggcatctgtccgtgggaccatgacttcacgcgctaccatttcatctaatgaaaagatcccttggagcatctcaatctcgtcagcatccagtgttgcttcactattggtcagcatatactcgatttcatcccgcgtcatcttttcatccggatcatcgaattccattggcgtgatacggctcaaaaggttggtcgacgctgaaagcaaccaaacaaaggggctgacaatttttcctaatagaatcacaatcggagctgttcgaacagccaactcatctttcaagttcatagcgattcgtttcggatagagttcgccaaacacgatcgaaatataagtcaaaaatgctagagataaaaagcttccagttgccagagccgttttggtattgcccatccatccagcaatgacatgtccaaggctatccgcaagactcgccccagataagatggtaatcaaggtgatccccacctgaatagtggataagaaatggttgggctgttccaaaacgctaagaagacgaatatattttttatccccttcttcagctttttgctctacacgagaacgattcaacgataccattgacatttcagtcgccgagaaaaaggcattcaacaatgtcaaaacaatcaataaaataaattccagtaaaatttcctgactgccagggtcttccatggataatttcctccagtatataatattgtatattataccacaaaataggagagcctgcattcttatattcattttctttttttaccatcaaaaaatcaggaacaggtcctgattttttaatgtggataaattgttttttcacacaaaataacttaagtgaggcttaaaacgatatatactattagtgtcattctaacccacactgaaacttttcgccgtgagaaaagtgaggctgggacaaaagtcctagcctctcaattgtttttggattgtcgagcaagacgcagtggttgagtgggctctactacgctgatttcatcagcttttacagccctactcaactgtgcggaggtgggacgacgaaatcgaattctaacgaattaccgatttctgtcccactctcactcgggagttttgggagtaaaacagtttgggaaactgttttagcctgaacctaaaaattaaaaagcgaaggggtccaaaacaaattgaacacgtgctgcggatcgtgatttagtcatggaacttcctggatttctgaaatcatccactggaaaatttcacctgacgtccgttctcacctaaggaaagtttctaggaagactttgtctttagtattatgcactggtgaaatcataaaagaaggcattgagtttttcaaccagctcaagtgaggataggctacttgtacagataaagggttttttctttaattctggcatcataaaattagctaccacaacgtctgcatccgaagcttcaatatctttcactgtcagattgtatttgatcatctgtgaaaattcgaagttatctgtacaatagaaattaaggaaatcaatcatagatttggcatggtgatcgtcaaaacgactaatgatcaagaccttaatcgatttccgacgacgcaataactgcggtaagagacgctcccagtgggtgtagaccgtataaatcatatgcttgaggatctcctcattcaaatcatgcttcatggtcttcatataagtaatcaaatgattcttcaaatcatcatagaaagctgggaaaatgctcataaagtcttcgtttgtattggttttaatatcaaataagagaaattcagagaataattccttccgacctaagtgagacgtattatggacgtgcatcaacatctcatctaaattttcaatttctaaatcataggtataacaaagattcttaaacatatctttgataaaggtagtggaatttttagcatattcatctgtcttagaagcttcaatcaaactttctggactaaaatagaaattctcttgaataaagataatgaagaattgctccagtactttttcatttaactccacccctagttgcaagctaaaatagcgcaacatctcctcgacattctccactccttgatacaactccttatattcatcaaaggtggttggcatatcgataaaatagccttgcttgatccgagacagatatactgtcaagagcactttataagacttgataacagagaaggtcagcggataaccatagagcttgaagaaaaaagtgattaagtccgtcacggcattctctttgaattctgggaaaggccactccatgtagtaataacgttccgcaaaatattgagcataaaagaaacgaacatccgtttcatctccaatgagtttcaaggggttaagattaatcttcacattgtatttcgtttgcaacttttgattaatggtccgaattaagcgataaaaagattgatagctgagattaaacttcttacaaataaattcattggacacatccttatgaaaaaatagatattcgatcaatgcaaatgcttgcgattctttataaaagtgatgataaactacttctagtccaatagaatcatcgtaagcgattttgattccgttagtggaagattcaatcaaaaattcatcaaaggtactacgaagattagataagtcttcttttaaagaacgttctgtacagtctagtcgggttgccaattcttttaagtggaaccatcttttttctttaatcaagatttccaataattgtaattggcgtctttgttttttcgataagaggagtctcatctttttcaacctttcttcatattttctttcagaatcatctttattttaacatatttaatagaagttgttgatttttttctgcaacatttcaaaaaataggtaaaaaactctaaagcccaattgggcaatagagtctaagatttgttaataattccgaattcttctttcttcttctgctcttgggccgcacgatggttatcatataaattcaccaagaatttcacaatttctttcccaattgaatagacggggatagcgaccaccataccaataattccgtagatattactagaaagcaataagaggaccataatggtaatcgggtgaaccttcatcacgcctccaacgatgcgaggataaagaatatttccatcgatctgctgaatgatcaacatatagatgaccgctttaatcatcatgtccatatctgtgaaggcataggtaatgatcatcggaatcaaaccaatggtcggccctacataagggatgagattggcaagtccagaaaagatagcaaaaaccaaagcatacttcaagccaataaaactatagccgatataagctagtgttccaatgatcaaagcatcgatcgaaataccactaatgtagcgagagaccgtttcattcaaactaaccaagaggcttgaaatgtggagtttgtcattacgtaaaatggttcgctctaacatcggcaataacttcttcccatcgaccaagaaataaaccaggaaaatcggtgtcatgattaaaataaaaaccgtattgacaatagtgttaactacacttcccaagctgtttgtgacactatttaagagattttgaaggatatccatataagagagattcaattgttgaatcgttgattggatattaatattttgaaacaacggattggtcgatagttttcgaaccaaactttggacttcccaatacaatccttgggtcgaattgatcaagctggttaactgattaatcaagattggaagcagataaaagatccctaagccaatgataccaaacaaaagtaccaaggtaatcaaaattccaaacacacgcttgatttttaagtgtttttccaacaattcaacaaccggattggtaatataatataaaaagcctgcaattaaaaatggtaagaggatggtattcagaacagatacaaatggcgaaatcaaagtccccattgatttccaaatatagaaaatcaccgtcaataataaaatctcacatgtccagaataacaatttactatttcgaaacattccctacctcctgttttctattctaccatattttatgatagaatttcaaacggcatttattagagtatattaacagtctataaccttgatttaataacattttttagcttttaatgggtcatttaatatcattagatcactccccgaactccacaaataactgaacaaaaaaacgaccctcaaggggtcaatcatttacgagttcagcaggcaagatctagcacccttttggggtgctttttattcatttttttcaagacttttgttgtcgctggacttactcttaagaaagacacctatataggtcgctgaagctccaatcaatatagcaaatccttgaatactccttttattataaattaggaatattgctcccaatacaataagaattgcgataattccagcaaaaacaacacccaaaaaactatctctattattagcattgaccactttatcttctatattaatgcggtgttcagattgtttttctgccattgccattattctgtcagctccgttaggaattacatcattaaattcttttaataacattggatgcggaataggaccagaatagctcatactctcaacacgtctagcaagtaacatgtctgcaactttttcttgaacgtcatctggttgctttttgatatactcagtaacttgattaacagtagcttcattaggcttctgctttgatttcttctttgagtttgtcataggcacctcttatatcatcaccaattatataccaatcattaaaaatggcttccctatcagcttcttctcctgattttgatgtgttatagattctcttatttcttgtagacgcaatatcaaggatcctagatacacctgatgcaaaatcatttttagcaactaagaaagtagttttgttattcataacccgcctccttatataaagactattgcttttaatatcttaaatgttactattatacacttattaagtatttttgtcactaattttatttggtactttaaaaaccaacatctataaactcacattccattataccattagatttttttcatctagttatagtatagcacgaatcaaaactattttacaccctgaaccaagtgaaataaaaagattctttcaaaaaacgaaccatagaggtcaatattataataacttttaaattcttactctagcaagtattaaagtaatatactcgtacagtgctaatttacgtctaaattagaccatataaaacgacaattcttaatttgaagtagtttatcttaccgaatagatgaaaaaactagcagaatagataaaccttaaaaataatattcagattcttgttaccattttcttatgattcaagatattattttacaaattaaacttaatgcactaaagctagacgaacgcctcaatattgaagagttagaagaaagaattttgaaactagaaaaatctatcgaattactgaatgatcagttagatagaatacacctggactaaaaccatttataaattctttctccagcatttaccaatattttaaagctccatcttattaaattaacgggtaaaattaattaggtttttccctattgcttttaaaacgttagcaaatgatagcatttttgtttttttagtagataaatcacgcgcactaattatcttttctataaaatcttcgctaatcgttcttttccttttcttaggatccggtacattgttggtactgaagtatctattttttccgccacatcccagttcggcaaggctctgacatagtataagcgtaatactgtacgttctaacgcgtatggatttttatcgatcattctaacgctttccagacgttcattgataaccttttctagtcgttcttccaagtcttctttcaacttaattgtagaaactattttgttttcagcattattattagaacttttttgaagtggtgaagcagaaaaataactacgcttatataccccactgtcaagcgattctatttctagtttaagcccctctatttctttatctagccattttatattttctagcatttcatttaattgctctaattccatttatgcctctgtcttctgagtactttttatctttattgataaatcactaataaggtagtctgtactgccatatcttcactactgccaaatgttgcttctgagatcttcacatccaccacttgaacagtggccaaaaagtcattcacttcttgctcaaattcttctattgattgtttccagccacgacggataaataatttagttttcatttgtttttctccttttgtttcaaattttagacttatttctaaaaaatgtaagatggttgtaaggtggtagttcctgaccatcttacagctaaaacccttgatattactgaatttgtaagacggtaagacgtgtaaggcggttttcctatacctctaatactaattttatttttttatttatttctttatcccccctaaaaccatattacacaccttacagtataagataaccccttgggagagtagcgtataacctgtaagatggtagcattttacaccatattacacaccttacatttttttaaagatagggatcatcttcaataggcgggaacatacttaattccttgtttacagtttcctcatgtggaataaaactattaaatcgtttttggtttgcaacacagtaaatggtcattacttccccattgattcttttctgagtggatttaacccctatagtttccaaagcctttttgactttagctgtattgttaccataagttcttttataaatgtctataagattatttttgtttgaccttattacgtattcagataactgtaattcatttatcaaacacatttgaaaatcatctaaggcttcattaccgttataaacctctacatctttccaaatgaacttttccccttgctctttgaaataatccagactggctaacaagaagcctatacagccctctatttttggttttttatcctggtcggtaaatgctttccaatatctttcaaaagcctgttcacgtaccaaatcgtcttccccctttggtctatccttgtattgaataagcactttccgcccattcatttcatcagacagcgatacatttctattggtatcaatacatagaacactggttagatataccaaaccttggttacctcccacgttacgccctagatgggttttctcggttgctatgatctttagcacgcgctctattttatcccctataatatcgccctgttcagttgctaaggccatttctccaccggaaaacgtagcccaggcgttgctggcttcaaatcctccagcggtaaggctatccagttctacatcaattttattaagaagaccagataaagcgatatgacgcaagccttttcctgttctaactccagacttcgcaaggaaaaaatttgtcttactccttaaagcactagcgacctgcaccatataataggtctgtaacagtgcattgtgcaggctatcaggatcctcaataacataggttagaaaatcctttgctacttctttgctttctatagctttgtcatagcctacggggtagtatttaaaaaatgatcgttggttatctattgtagtgcgcgtgacggtgtgggtttctaaatcaattataaagtccttaccagctattttataaagttctaacttcctcactggttcaacgtgaaaatgtttatcaattccttttagaatatccaccacgtaaccaatatcgtttttaaacccgtaaagctttgcaagggtcatttcatctattagttttgcttgctggttatttatatcgaaaatacggttatcaaataccacatacctacccattaaataatcaattaccatcttggcaaaggtggggaatgttgtcttatatattactttgggttcgctgttatcttttatttttacactgctacaagagataaattttttctgttcaccgttcctatcagcgatatacataacttcactttcaggtattaagatcttcgttttattatgttcgatattattgaagctgtctaattgatatatattagcaagttgctttttataatcggccttatgctttgactgaccataatcttcatcagtccaattcaaggaaacgacttctttcaattgatcaactatattcaaatcacgcgccccctatttttaagttttcggaacttctttaatttctgccgttctttcatttgttcataggtttcttgcctgttttttcctgctttttcttggcctatttttgtaactccaaaagcagggtgttttaaatgtataccgctcatttttcaacccccaaaaagatcaagatatcactcactttatagtacgctttgcgcgtgtcttctaaaggtggttggtaacgtttcaagcctttttcttcccagcgtttcagtgtgttgtctgttacgttcagttcatcttttaactgctttgctgtcataagccctaatagtctttgttctggttggcttttggattttaaaaaattatcaaccagatctaaaagcgcgtgtgacaattcaaattcactttctttactcaaactaaacattttcatcccccttgattccgttaagtgaaatttctccacgaatttcaaaaagaatgttacaaatggtatttaaaccagcggttagagttttttcaccctccataatttcagctaagaaatctagtcgatccattgccttatcaatcttgttaatcaattctgttttgttcattttgttctccaatcttcctttaaaatactttaccattaagtcttattcgacttttaataaacaccaaagaatggtataatttaaccataaaaatatttcctaaaacccttacggcttgcctgctgtcctgtgttttagttaattccgtttaaggcttgtaagttggtttctacaggcctttttatttgaaaaaaaacatcaaaaatagcgcaaaaaactcttcttgtgctatactgtaattgagattttttaaatttttggtgttagaactgttgcctcagtcctagcactttttctttgtcgtattcttggtgtgttgcaagaattttgtaaatgatacgaagcaacttatgtgcgcaagcaatgacggctttcatcttacttcctctttgggaaattttgctataaaaagatgaaaacacgctgtctttagagtgagccgcaatcaatccagacattgtcagtgcctgtttgatgtaacgatttccttgtgtgatgtgcgaggattttttaatgccagcactttcgtatgaaccagggcagagcccagcccaagaagctaggtgtgcgtccgattgaaaagccttcacatctggtccaatctcagctaaaatagtggctgcacaggtctcactcacaccagggatcgtttgaagtaatctattttcttcaggggaactccttttcgatataagctatcatttcactcgttaatttattcatgagtttttgatacaattgatattcttctaggctttgagccaagagaaatcgatcttccagtgacaacttcccattcatggcctccattaattcttctggacttgctttgacatgcttgtgaatacaagctgtcacattgtcataatcaatgagttccccattgataaagagcgttaaaagagactgtcctgtcttagagaagatatcagaaagatagctggttagtttgatattagcacgttgtaagaggttatgaatctcattctttatttgggtttgacgttgcttataagaacgtagcctacgagtgagtaaacgtaactgcatcacttcagggttaggaatgtaagatggctcaataagtccacaacgtccgagttgagcaatccattctgcatctttcatgtctgtttttcgaccaggtacattcttgatatgttgagggttagctaatattaaattgagttctgagtctgaaaaaatattaaagagcggcacccaatattggccagtgctttcaaaaaagacatgtgtgacgtgattttccaataaccaatctaaggcgttttggagagctatagttgttgtaccaaattttttctgaatttttttaggtttattgctttctagtggaccatctagaatacaacaaacgatagacttttggtggacatcaattccacaagaagtttcaatcataacttccattacaaaaacctcctgttaactattgaacaatagaacaagaggctattaataattttattttcgtgctcaaggcatattcgagttatctcatgactcttgttcatccagtttttgttacaggctaggcaaagccctattaaagaccacggatttgtattgttcaccttcattataagccgaactttcttttctgtcatgagttagcaggctctgcctgcttagagtttttgttgctctcacgcgctttacagtgagttcatctataaattatatttcaaacaaaagtttaactcgttaaacttttgccctataaaaaaatctttacttcacaaccaagagccttagctattcgagtaagtgtcaaaattttaacgtccttttcttttccagtttccaaaaaagaaataatagagcgcgacaccttagctttatcagccagttcctcttgagaaagtttttgcttttttcgaatctctgcaatcttctttccgttcaaaaaaaatcacctccttttttcggtttaaccaattaaactttttaggttatttaaaaagctatcgcttataattacagtttaatacattaaacattatttgtcaagcgcattaaacaaattgttgctatttttttatttgcattgtataataaattaaacagatgcaaacgaaagaaggaaaaagttaatgaaaataggcgctatcgttaaagaatataggcaaagaaaaaagctaaccatggaagaatttgctaataaaatcggaaagagtaaggggtatatctcaatgttagagaagggcgagaatcctcaaactcataagcctatagcaccaacttttgaaacattaaaagaaattgccaaggctatggatttagatataaacgctttaattaaacaattagatggagagcaaatttttgaagacacgccagctagatatgactgggataatgaagaaagaaatttgagaaactgggggacttttgaccatgaaggaaacttttcaccttcagtttttgacgaaaaaattttttccgatataaaaaatacattatcagatattcaagaaattacttttacccagcgcgatatagaagctttctactcttcttgtgttattgatggtacaactattaaagatcgagacactttaatcaagtacttacaaaaaacagttgaagactatgacgctctattaaacggtgtaaatgaccatgataggccacctttgaatagtgggattctatcaaccttaactaatagtagaaacaattataagtattatttagaaaagttagaagcataacccacgcgctaatggtttattttaataattgtaaaaggtagaaacgaggtaaaagtaatccttttagggactccgatttgtacacttttaatgataggtttagggagttgttatttgcgtcaccctatattgatattaaaaggttgtctatcttaatacataatgcacaatacgccttaaaacacgttttaagcgcgtgaaatgtctgggtcaccaaaataccggatagcttattaaaattgttatacagctttattatctgcataaacaaagcatattctaaaaccattcaattttcttagctagtaataagaagaaacgaggtaaaacaaatgacaaaatggaactagaaaaataaaagatcaggatattattaaaaacatataggagaaacattatgaaaaagaaaattattactactgctgttgttttagctcttgctactggtggagcgggctactatttcttatcttatgcccctcaccaaactgcaataagtcactttgaaaagtctgttgatacacttaatgagaataataaagcaattgaaaaacaaattgctgatactgaaaaaatcattaaagaaaaagttgaaccattagaatctaagactttagaagatttaaaaactgctgttaaagaagcaaagacctcaattcgtaaagctccaaaaatggaaagcgatacacaaaaaattgaagatcaagcaaaagaaattgcaaaacccgttgattattctagagctcaaaaaaacatcactgagaaactaacagcgtatcaaaacagtgtgaagcaactcgcgcagattacaaaccctaaagattcttttattgaggaacgattgaaagaagtagatacaatccaagaagtgcaacacgctacagaagaaaatgaccctaatggtttattaaacaaacaaggtggctatactgcttctatctattttgcagataaccaagtaactgaacctattgagggtgctaatctagtagataagggaactgaagcaggaggcgctattgaagtatacaagaccaaagaagaagctgaaaaaagaaatacatacctttcagcatttgatggtggagtattagaccctggatctcattacgtgtatggtactatcgtaattcgtacctctcaccacctcactgccagccaacaaaaagccttaactgaaaaaatttacaataaactaattgaactaaaataattatttcaaatacagtgataaaaaaatcatgaccaaaacacattctaaaacctttacggcttgcctgctgatgaattagaaaggtttagatcatgaaaattacagaacacaaaaagaaagacggtacaactgtataccgtgctaatatttaccttggtgtagaccaagtaacgggaaaagatgtaaaaactagtatcacggctagaactagaaaagaggtcaaacagaaagccaaagaagctgaaatagacttcattcaaaatggttctactagattcaaagaaactacaattaaaacatataaagaactagctgaattatggtgggaaagctataagcatacagtaaaaccaaatactcaaggcaacatgagtaagattttaaataaacatatcctgccattattcgggggttataagctggataaactaaccactccactaatccaaaacataattaacaaattagctggaaagacaaataacggggagcaaggagcttatttacactatgagaaaatccatactgtaaacaagcgtatcttacaatatggtgtggttatgaaagccataccatttaacccagcgcgtgaggtcattctcccaagaaatacccagaaagaaaagcgccaaaagattaaacactttgataatattgagttaaaaacgtttttggactatctggacaacttggatagtgatagataccgctatttttacgagaaaacactttacaacttcctacttgctactggttgccgtattaatgaggcgttagcgctggaatggtctgatattgatctagatagagctgtagttcacgttacaaagacactaaaccgtatgcaagaggtgaatagtcctaaatcaaaatctagttaccgtgatatcgatattgaccccaaaacggttacaatattaaaacagtacaaacgtagacaaacccaagaggcttggaagataggacaaactgaaaaagtagtattttcagattttatccatgaatacccgaataacagtactctttttacaagattaaaaacacattttaaacgtgctaaagtgcctaatattggttttcatggtttccgacacactcacgctagtttgttattaaatgctggaatgccttacaaagaactccagcaccgactaggacacgctacgttatccatgacaatggacatatacagtcacctctcaaaagagagtgcaaaaaaagccgtttcattctatgaaacagctctagggagtttgtaactgaacaaataactgaacaaagtcagaatacaatgtattacgacaagcaagaaaccctataacaacaggctttatgataattctatctttaaattaaaagattttatgatagaatagaggggattttaatcaaaaggatgaagttatgaataatttgattgaactacaaaacgtcaatttgatccgcaatggaaaatctcttttaaaagagattaactggcaagtgaaagaaaatgaatgctgggccattttaggcctaaatggggcaggaaaatcgactctcctcaaacttctcatgtctgaatattgggctagttctggccaggtaactgtccttggaacccgctttggagaaggaggcattcctgagttgcgtaagcgtattgggatcgttagctcctttatttcagaaagactgccagagcatcttttgacagaacaaattgtcctaactggtcaatacaagagtagtattttatatgttgcatacggggaggacgaactgaattgggcacgggatatgctaacttcaattggagctagctctttgatcggccgcaaataccgtgaactctcccagggagaaaagcagaccgtcctcattgcacgaagcctcatggaccagccagatctgatcattttcgacgaagcttcaagtggattggatctctttgccagagaaaaactactccgtcagatccatcatatcaaacaactggatcacgcgccaaccatgatctacgtcacccaccatgcagaggaaattacaaaagacatgacccatgttctcctactcaaacatggccgagtggtcgagcaaggaccaaaggaaaacatcctaactcctcatgtccttagcaagttttatcaagcaccagtatcccttattgatcttggagatgagcgactttttgttaaaccagatatcaggaatgacaaagacaatgaatctaaataatcctataacaaaaactctaagcaggcagagcctgctaactcatgacagaaaagaaagttcggcttataatgaaggtgaacaatacaaatccgtggtctttaatagggctttgcctagcctgtaacaaaaactggatgaacaagagtcatgagataactcgaatatgccttgagcacgaaaataaaattattaatagcctcttgttctattgttcaatagttaacaggaggtttttgtaatggaagttatgattgaaacttcttgtggaattgatgtccaccaaaagtctatcgtttgttgtattctagatggtccactagaaagcaataaacctaaaaaaattcagaaaaaatttggtacaacaactatagctctccaaaacgccttagattggttattggaaaatcacgtcacacatgtcttttttgaaagcactggccaatattgggtgccgctctttaatattttttcagactcagaactcaatttaatattagctaaccctcaacatatcaagaatgtacctggtcgaaaaacagacatgaaagatgcagaatggattgctcaactcggacgttgtggacttattgagccatcttacattcctaaccctgaagtgatgcagttacgtttactcactcgtaggctacgttcttataagcaacgtcaaacccaaataaagaatgagattcataacctcttacaacgtgctaatatcaaactaaccagctatctttctgatatcttctctaagacaggacagtctcttttaacgctctttatcaatggggaactcattgattatgacaatgtgacagcttgtattcacaagcatgtcaaagcaagtccagaagaattaatggaggccatgaatgggaagttgtcactggaagatcgatttctcttggctcaaagcctagaagaatatcaattgtatcaaaaactcatgaataaattaacgagtgaaatgatagcttatatcgaaaaggagttcccctgaagaaaatagattacttcaaacgatccctggtgtgagtgagacctgtgcagccactattttagctgagattggaccagatgtgaaggcttttcaatcggacgcacacctagcttcttgggctgggctctgccctggttcatacgaaagtgctggcattaaaaaatcctcgcacatcacacaaggaaatcgttacatcaaacaggcactgacaatgtctggattgattgcggctcactctaaagacagcgtgttttcatctttttatagcaaaatttcccaaagaggaagtaagatgaaagccgtcattgcttgcgcacataagttgcttcgtatcatttacaaaattcttgcaacacaccaagaatacgacaaagaaaaagtgctaggactgaggcaacagttctaacaccaaaaatttaaaaaatctcaattacagtatagcacaagaagagttttttgcgctatttttgatgttttttttcaaataaaaagtgctaagacaaatgagcttagcactttttaaatctttaaatatcttttctagatgacctcactatcagtatgaacgctacaccgaccaagaataaccctagaatttccaaagctatcatgatctttgtaccagtttctggaaggaatttcttagaggtagacttgctagttttctctggtttccctggtttttttggactctctggttttttaggtatattcggtgttgtaggtggggtagttggcttatgactattagttagaacgatattatttccatcttgtaccgtttctgtcactacataaccttgaggtacttccacttcacgaaccgtataggaaatcgcttttcctttagaattctcagggagatttgaaaaagtataggtccatttattggcttcacttaactcaactacatctccactcttttgaccatttgcatatagttgtaccttgatcgtcttaggccgaattccatccttgttattttcatcatcccaatatttagttacagtgagatgcgtctgacccggtacataggtattggtcaagatatagttaacttggtcaatacttgcagaataatctgacaccttttcttcctcaagggtgtagacaatttctcgaccattttcatattttggaagatgatcaaagctacctgtccaagctgtggtagctgttacagttctgctctcaaccttctttccattcgcaagtaagttaacaataataaagttcggacgtacaccatcttgattatcaaaatctttccaaatttttgtaaatggaacagagactacttctggtgtataggtatttgtgagattatacccctctacacttgtttcatagtcagggacaccttcttccgagatcgaataatccactacttgaccgttttcatattttggaagatctttgaactgatagttccagtgaccgtctttatctgatttgactgttgttcgatcaatcttcacaccatttgcaagtagatttactgtaatttctttcggacgttttccatctcgattattgtcatccttccatatcttactaccagatacttctatcgtttccaaagtattcacaaggacgatatgttccatgtcttcattattggtagcttcaacagttgaaatataacctggtactcctacttcttctacagagtatgttcctgtctcatccaattccgtaaaaataccactccattggttatcagcattcaattctaatgtcttgccttctacctcaactccatcttttaataacttaactgtaatagagcttggtcgattcttatattggttatccttatcgttccatttttttgtcaccttaagttgacgatgattagccttttcattagaaatagtcagtgtcaatactctactatttacatcatattgggaattttctggactaaaatcattttctgagatagatacagggtctttcaacaattgatagccattaggagccacaacctctgccaccgtgtaattatctcttaaaaggcctggaacaatcaagtcaccattggcatcacttgtaaatatttctgactcttgaccattttcggtatgtgtaatcgtttggttattcgatacacgcgtgatcttaaatttagccccctgtaaaggatcaccattattattttgcttatggagtttgatgctataaatatagccatctaaccgtcctccaggaatttgccataatacttttgattgagctctactctcttcaatttgataaccatttagggtaactttattatcaaatttttcaccatcttttggtgaatagtttagttttacattataacgaatacgataggagtcattctctgaaatatcccctaattttatttcaaatgttttatcggaaggaaatgcaatctcatatggtacagattgggcatttttaaagacccaatcaccactttcccacagccattgccccttctcaacaataaacgaattgcgatcatattgtgcattagagaattgtagtgtatcccgtataattgcatttttaatattggttggtttacgattgactccaattgtataatttataatcggatcattggtatcacgattgatagagcctaccttcgatattggataattttggggttgtgctataccgatatatttaacgggaggttgaggtggtgtggtttgaaccactttgttctccacaatcaaattgattggaatttcttttgcatttggtactaacttatgatctatacgaacatagaaaaaaatatttcctgtgatatcagagttatgctccacataatcagtataggtaagaactattttctttctatctttgtctacttttgcagatgcagcaacctgacctttcccatctaatacttcaaaatcctgactattaatgattaaatctgttggaactgcaatagttgttgtatctccagctttaacttgatgatttggaagttttagtgtggcatcaattcgaaaagtcgcccatggttctaatgaccaatttaaaagtcctccttcattattagtatatttcacacttgtaatcacatcatcaactgcttttggagtattgactgccgcgactctatcttctcccgatgttgatagagttccagaaacaggatcattactattacttaaagcttcacttgctagtacggcctctgtactagaagaagacgtggtggtggtctctgccaatatacctactggcatcacaaacattgaagagaccagaatgaatagacttgctagatgtatccatttagcaggccatttttttgtttcctttaaccgtttcataaaatttcctttcccacttgagataatcccccaaaaaaacaatggatcgaataccgaataaattaaaaaacatatccatatatactctgctatccacctcgattatagtacatttaaaataaaagtcaatactttatcgctgttttttatcaaaaatattccccgaaaatctaaagttgtagaattttagtgaaacttgtttgaaagttacaatatttattttccaaatagaaaaaaggaagggcaaaaatgtccaacctttaatatatagttatcaaagcagttgattgttcaatgggctaccttgaaccagtagatagaacttgagaagcaaattacttaggtcctcattttcttttttagatcagaaaaggagctaatggacgaaccgagtatctcatatctacgatgactcaaacagtccactaaaagaattaatccttgcaaaaacgaggaattttcttataaagaactatcgattccgtgcatactcgatcatatcatatgggagagtattagcactttctcttaaggaataactttctaattcattgacattttgtcgcatacggcgtgcttgcttggcggtaatcaggtgttgcgcttcatattcaaaaataatcttacgctccaaataatagcctctcaacatttcatcgatattattcggtttcacgcgattaataacccgctccacaaaggctccactagtaataatggccgtctctctcagacgagattcttgtagaaaagagatcaaactgctcctataaactcctttgaggtcttccaaactttcgataatgatttctgtattagccagatagagggctgcaatctggtcataatcaatggcctctaacttgctgtcttctcgggtcaaccagtttcgcaagccagacccaaaagttaagatctcatgaactaataaacgcaagagacggaaagacaccaagaagtaataggttagacgatacgaaagattgcgattgacacgttgttccatattgtgaagatagcgttggtagacacggtagccccgctctcgaatcttcccttcttcataagcctgttccaagccgtcactttcaatactcaaaatcaggagcttcaactgttcccagtccttttgaatgagcctgttttcttggcctagaatcaagttttctatgcgaccatggtagttatcaatcgccgcatacaaagggcccttgtgcttactattctttagatctgcttctaattccatgacaacatcatttaaaatcgcgatctgcatcaggtagtcattggtttcttccttgtcttctgataattttggaagtaccactaagcctgcaataaagctaacaagggtaactcctgccaccaaaaagagtaggatagggtattctttttcgatcttggttggaatcaaaagaatcgtcgcaatcgaaaccgttcccttcacacccgaaaaggtcagcaataaggcatcctttagataatttctcaacgatttttttagtcgaaccgttcggaaccaataaaagaggtaaaccatgacaaaacgaatcaaaaagagcaaggctgtcaaaagaaagacagaaagaactaaaagaagattattgtaaatgggactacttaagatgggcttggcgatcatttccaattccattcctaagatgacaaagaccgacccatttaagataaagttgaccgtattccagacagtatgactcacagtgtctacccgcgcttcaaggagggtaatatgcttaaagcgactggcttttaggatccctgacacaactactgcaatgataccagagacatggagttcttctgctaggaagaaggtcaacaaagggaggctcagttctaataacaattcactggcaatatcactggcgcgaacactcaagagtaatgtttgcaaccaacggttcacaaaggccgtcaagatccccactgcaaatcctccaataatggagattcctaaggaaatccctgcctctccaagggagaaacttccggtcgcaagggctgccaaggccactcgaaaggcaactagacctgaggcatcatttagtaacccttcgccttttaagatattcgaaacccgctttggaaaggtaaatcgctcagacagagaagcaaaggctactaagtctgtaggcccaagggctgcccctactgccatacaggctgctaaaggaaggctcagccataaggagtgagctgcccagcccaaactaatggttgagataaaaatcactggaaaaatcaaatagaggatgacccgccagtgctttaagacggaagtaatatctgcttcttctgcctctcgaaataagagagggccaatgaccagcgccagaaagagctcggtatccagatgaaaattttcttctggcacaaagagggcccaaccaatccctagtaaaatttgaatcaagggcagaggaaggcttggcacaagtttattggtggcatttgagacgatcaaaatcatcgaaaagatcactgcataaaggagtagttccatatcactccctccttagcgttcttggcagcaggtctcaaattgctgttttaactccgcaatcttttggtctgtcttggttacatccttgtgctcaatcttcttttggcaccgttccatctcaagcgaaaccaatttcttttttattttgagcatctttttggtcatatgagcttcatcataaaaacctattgcacgctcgtggatggttgattcgacaaaatgatgtctcaatccttcgattttattctttaaatattctttatccatgacggtagctttctaatttttcgatcatgaccaaaaacggtggctgattcacttgattcagtgtccggtagatggtcgctgtatagtctttttgagggagctgactgacaaagtccagcactgcatcacgctcgatgtctcctccctcatgaccataatagatcataatagccattcgcccacctttttctaggcgagcacagattttttccatcgcttcaatcgtggtagcaggaagagtaatgaccgacttatctgcagatggcagataccccagattaaaaatagctgcttttagtgtctccacatattggtccacatgctggtggccatccaaaatcaaccggacatgttgaagacccaacttttccaatcgttcttgggtatttacaagtgcttgttcttgaatatcaaaggcatagacctggcctgttagttgggctaaaaaggccgtatcatgtccatttcccatggtcgcatccaccaccacatcttctttggtgatgacttctgctaaaaattgatgggccatttcaagtggtcgaagcatcagcagtctccttttcttctagcttacatccttgggtacttccacgccgacgcatttcagtttcaatagcgtttaggacttcccatttgttgaggctccacatagggccaatcaacatatcccgtggggcgtcccctgtaatccggtggatgacaatgtgtttggggatgatctccaactggtcacagatgaccttgacatactcctcctggctcatgagttgaagtcgtccttcatgatagtcccgttgcatccgtgtattggtcatcaaatgcaagaggtgtaacttgatgccatcaatttcattatcggtcacacaacggcgaacattttccaccatcatctcatgcgtctccccaggaaggccattgatcaaatgggagacgatctctgccttgggcacctgtttgcgaatacgcttgactgtttcaacatagagatcataactatgggcccgattgatcaattcagaagtcacctcataagtcgtctgaagacccaactcaatcgtcacatgcatgcgctctgtcagctctgctaggtaggccaaggtctcatctggtaaacaatccggacgcgtaccaatgttgattcctaccactcctggttcattgatggcctgttcataccgctctcgaatgacttccactttatcgtgggtattggtgaaattttgaaaatagaccaagtacttcttcacatctggccatttccgatgcataaaatcaatctctttgtaaaactgttcccgaatcggagcttctggggccacaatggcatctcctgaacccgagaccgtacaaaaagtacagccaccatgggcgactgttccgtctcgattgggacaatcaaagcctgcatcaatagggactttaaaggtcttttctccaaataaggttcgataataatcattcaaggtattgtaggatttcatacccttcattatagcaaaaaaagagtcgaactcaaaacgcgagttcaactcctatttgttagttatttttgcttgcctgtaaagcgccattgaaaccgcaagcgatcatacaagggatactcaaactgtaagacagcaagacccaaaatcatactgcctagaacgtctgatgggtagtggaccccgacataaacgcgggaaaccacaatgatcacgattcccagaaccagcaagccttgaaggcaatagcgggctgttttatgttttacatgttggccgattatgatgatcaaacttcccaaaacaagggtagatgccagtgaatgaccactcgggaaagaaaagcccttttcctctactagatgaagaatacttggtctcggtctctggtagatattctttagaagaagaaccaaaagaccagtcaataccagattgctccctagaaaaagagcttcactgtaccatttcttataggcaaagaccgccagcaaaagacctacccagatgacaatgatcttggtatccatgacgtgggtcaccttggtaaagaaggccgtcagtgttgcaggcagatcgcctcgaatagcagattgaatcgtgctatcaaagcctgttaattgttgcgggtaaaagcgaatcacatacccaagaatgacaaaaatgagaagggcgaagcttgccttcgcccaatgttgttgtttatttttcatattttttcaaaatcggttgcaataaggtatagatcaacccaaatgcgatggcccaaatcaccccttcgatcaggttaaacggtgcaaccattgcggctaaatagtggacaagccctagtgttttcgaaatatcatagttcataaaacgagcatacaaagggattgcatagacatagttcaccaataccatcgtgatactcaagctgatcgttccaacaatcgttgccaggacaaatcgaccatgggtccgttctttgttccaaatccatgcaaaagcaagaacaaaaacaagaactccaatgatattgattggtaatccgattaaggtctcaagccccttattattaagggctaatttaaggacagatcggatcaaggtcacccaaacggcacttttaaaatccaataggaccaaggccaacaaaatggcgatgatactcaaatcaattttgaagaaatctatcaagaaagaaaattgatagaacatcaaaataaaagataaagcggataaaacagccactagggtcagtttacgtgtatttgtcataacaggttcctccaattttttaaaaattagagaagctggaaagacgtctaccccatcattctactctaaactatttaaacaaagcttaaactagaaactattctagttactttagctggtctccatcgaaacatgccgttagtcagtcttagactcaaacatactattcccatgcatcagctctaaacagatcagaatagctgtcagtctattcgtctctcgtcttctcccatccagactatactgtcggttgtggagtcacaccacatcagcttgcgctcgcggacttcttttagagtatggaaaagaacatttcctagtaaaagtcaccgccggtcgggaattacaccctgccctgaagacccttttatgataacaaaaaaaacttgcctaggcaagtttttgtaacgtcatggattacatcgttcgggtttttaattattatcggctatttgagcttgtcttgttcataccgatgagtcaactcaagccctttgaatccctgctggcggagagcctcatagacaatcatgcagacagtattggagacatttaaactacggacatgctcgtcattcatcggaatgcgaatagccttctcttcgtgctggcgcataaattcttccggcaatcctttatcctcgcgtccaaacaagaaataatgggacttcccatcctgataagaaacgtccgaataggtctgatttgcaaacttggacactaggtgcacctgaccgtcgcgcgcagcttccataaactcttctagactatcataaaagcgaacatccagcttgtcccaataatcgagtcctgctcgcttcattttgcgatcatcgatcggaaaagccatggggcgaatgatatgtaagggggaattggtcgccgcacaagtccgtgcaatatttcccgtattttgtggaatctgaggttggaacaagacgatgtggttttgagctgctgactcttggtagtccagttcttcaatattcatactcgatctctttctgataaaaaaatagccacactgcccggagtcaagctcagcaaacagcgtggttacagcttcattaacttaactcacaacaggtttgaggtaaatcaacgaaggtactttctaagtatatcacttttgaagctcctgtcaatagtttttttagatttttttaagaaactttatcaaagttttcaatccctcctcattctactcttttgccaatttttcctacttgttcttagcttctcaaaattccaccagaaaatccttaaaaaagatgaatttttcttgaaaatagagtatgatagaagcatactctggaggtattctatgaaaattattgttgttggtggaggaaaggtcggaactgccctttgtcgttctctcgttgctgaaaaccacgatgttattttgatcgaaaaagacgaatccgttcttaaccatattaccaaacgatttgatatcattggaattttaggaaatggggcgaacttcaagatcttggagcaagcggatgttgaaaactgcgatatcttcatttccatgaccgagtacgatgaagtgaatatggtctccgctgttttggctaaaaaaatgggagccaaagagaccatcgttcgggtacggaatccggaatattccaattcctacttcaaggaaaaaaatatcttgggcttctccctagttgtcaatccggaattgctgacagctcgttatattgccaatatcattgacttcccaaatgccctttctgtggaacattttgccaatggtcgggtagccttgatggaatttaagatcaagccagatagcaatctctgcaatatgagtctatcccaattccgaaagaaatacggaaatgtcattgtttgtgcaatcgagcgtggcaacgaactcaccattccaaacggagactttgtcttacaacctcaagacaagattttcgtaacaggtaatcggatcgaggtcgttctcttccacaacaatgttcgccctcaggtcattaagagcatgatgatcattggtgctgggaaaattgcctactacctactcaatattcttcaagatgtgcgtcgcaagatcgatctcaaggtcttagaagtcaatcgcgagcgggcggaattctttagtcaagaatttcctgatctctatgtcgtccatggagacggaaccgctaaagacattcttttagaagagagtgccaataacttcgatgctgtggctactttgacaggggtcgatgaagaaaacatcatcacctccatgttcttggattctgtcggagtcaaaaagaacattaccaaggttaaccgaactagtctgttggagatcattggcgatcaggatatgaccagtatcgttacgccaaaacgcattgccgtagacaccattatgcactttattcgcgggcgctataatgcacagttctcaaacctagaagctttgcaccatgttgcaaacggccggattgaaaccttgcagttccaaattaaggaagacaataaactaacccaatatcccctctctgaattgaaattgaaaaaaggcgtcttaatcgctgccattattcgagatggtaaggctattttccctaatggagatgaccgtttgatggtaggagatcggattgtcgtgaccaccttgattcaaaatgtcactaaaatctatgatttagttgagaggtaagcctgatgaatagaagcatgattcgttacctcttgtccaagctcctcttaatcgaggcagctctcctgatcgttcccttagtggtcgctgccatctatcaggaacctgccaaggtttttgtctcaattggggcaactgtggccatcttacttgggctggggctacttggtagttttcacaaaccaaaggattttcacatctatgctaaagaaggagtcctgattgtagcactctgttggatcctctggtccttctttggtgcccttccctttgtcttttcgggacaaatccccaacattatcgatgccttctttgaagtcagctcaggctttacaacaacaggggcaacgatattagatgatgtgggtgtcctcacccactctctcctcttttggcgcagtttcacccacttgattggggggatgggagtattggtctttgcccttgccattatggacaataacaagaacagccacctcgaagtcatgaaggccgaagttcctggtccagtttttgggaaggtcgtttccaaattaaaaaacacagctcaaatcctctacttcttgtacttgggcttgttcttcctctttgtggttctttatttccttgctggcatgcccctttatgatagttttgtcatcgccatggggacggctggaaccgggggctttaccgtttttaacgacggaattgcccactacaatagtagtttgatcacctatttggtcagcatcggggttttagtcttcggggttaactttaacctctactacttcctcatgatccgaaaattcaaagccttctttaaagatgaggaattgcggacctatatcacgatcgtcctcgtgtccagtgtcttgatcgcttacaatgtccttcatctctatgccaatgtcgctaagagttttgagatttccttcttccaagtttccaatatcatcaccaccaccggttttggttatggaacgacggaaaaatggcctctcttttcacagttcatcctcttgatgctgatggtcatcggtggttctgctggatcgaccgctggggggcttaaagtcattcggtgcttgaccttatggcgaatcgcaaaaaatcaggttctttcgaccttgtctccgaatcgcgttctgaccttgcatgtcaatgatacggtattggataaggatacacagcatcagatcctcaagtactttacaatatacagttttatcacgatcggcttgctctttgtagtcagtctagataataataacttcatgacggttgtcagcgctgtctttagttgtttcaacaacattggacctatgattggaacaggtcaaaccttctccatctttagtccgatttcaaaactgttactttccttagccatgattgccggacggcttgaaatctatccaatgattctactcttcctccctaaaacatggtctaaacgctgatagacaactctagtacaaaatcaacgagagtgggacagaaatcggtaattcgttagaattcgatttcgtcgtcccacctccgcacagttgagtaaggctgtaaaagctgatgaaatcagcgtagtagagcccactcaaccactgcgtcttgctcgacaatccaaaaataattgagaggctaggacttttgtcccagcctcgtttctgtttatttgcgatcgtcctattttgattcttcatttcgcttcagactaaaatggtctggcaaggggtctggtcccgcctggcttccaggatggcaacgtagaatccttgcaatccccaccaagacacctttcacaccaaaacgttcaatcgcttggatcatataattggaacaagtcggttgaaagcgacaagaaggcggaaataagggagagatccatttttgatagcctctgaccagcgcaatcaggattattttcatgcttttttagatttagttactgctagattgtgcagctggctgatttcttttttattcaagcgacggtattcacccggacgtagtcctgagacgtccaaattcccaaactgggtccgggagagtttatccactaaaagtcccacagcttcaaacatctttttaacctggtggttacgcccttcatgaatggtcaactgaaccactgaacgattcttttcgacatccacttttaagatctcgtaagtcgctggcttggttttctttccatcaatggtcacccctcgcgtcaagggacgtaagttttccttattggcaatccctttgacacgcgccacatagaccttatcaatttcatttcgagggtgaatcatctcatctgtaaaatcaccatcattggtcaaaatcaagacaccagacgtatcccagtccaaacgtcccactggatagatgcgctctggtacttgagataaaaggtcaacgactgttgtccgtcctttatcatccgatacactagagatgacgccacgtggcttatttaaaagatagtagaccttttcttcgttatagattggagtcccttctacttcaacctgatcaccggttttaatgatggtcgctaattcacgcacaacttggccattgaccgtcaccaagccttgcttgatcagttcttcggccttgcgacgactagccacgcctgcatgtgcaatatatttgttaattctcatctagttcctctgttctctctgaaaataattgaccttcttctggatcgatgtccacttcttcaacctttggcaattcctccaaatgattgatccccatataatccaaaaaatactccgtcgtgacatacaaattaggacgcccgaggacttcttttttcccatcttcgcggatcagatcaaatgaaagtagtttggtaatagcaccactggaattgacgcctcgaatatcatcgacctccacgcgggtgatcggttgcttataagcaatgattgacaaggtttcaagggcagcccgagacaagctctggttcataggcgttctagaatagtctcgtaaaaccgaagcgtagtctgcctttgtcaccaatttataacgggaagctgtctccatcaaacacagactggtatctgtatcctcctggtatttttgggccaatttttctaaactttgcaccacacctgttgggggtaaagagagaagatctgcgatttgtctggcagtaatcccttcttcacccgctacaaataagagtgcttcaatttcagctaatttgctcatgttcaatcctatttaagtaaatttctccaaaaaccctatcttgtaccactgtgacctcttgaatcttgatcaactcaagggttgcaagaaatagggtaatgacctcttggagatccgctgcttctagaaacaagtcctgcaagagaacttgtgagcgctcgtggaatcggtgacgcaactggtccatcagatcctcaatcttgtattcatcctttacaatggttgtatggttctggcggaattcttcttttttcttggtcaatagttttgagaaagccaagaagagatccaccgtggtgcgatcatgaagtaattcggtatcgtcataaatcaattccatctttggttttgaataatagagggcacgttcctcgtgctgtgaggccatcaactctcctaattgcttgtaagtacggtactcttccaattgagaaaggaggtcctgctctagatcctctgcttcatccatctcctctgcgaccttaggaagaagtcttcgactcttgatcagggttagttgactcgccatcagcatgtattcccctgctacctctaatttcatagcctggagagtcgccagataagccagatactgttcgatcaccttaatcaaggggacctcatagatatccatctggtatttagagaccaagtggagcaagaggtccaaaggcccttcaaaatctttaattttaatatccattatttatatttttctaatgtcaccatggtttttaggcccaattcacgcgcaatactaaagagatccacaccgagttcacgttgtttcaaaatatactgctcacgaattgattgtgccgaaaggtcttggttgcctttttcgatcaagaaggcttctaactgtcggaatccccactgacgagagtatgattttcctttattatcaaagagatagacaccatcgaggaagagctgcaactcatccagtaaaggctctggaacttttaaaacccgtttttggccatctttgcccactcgaatgacatgaaagtccagctgaatatcttcgaccttgacttggaggatctcacttggcaataagcccatctccagaatcaacaaggccatcaagcgtccctgagggttggttgattcttcccaaaaatgggttagatccaacaattcacgatcatgggtcttggccggttgaattttaggcaagaccaaacgatggtattcagaaataaagcgttcttgatacaaataatataaaaattggttaacagcggataattttcgtttttgaaccgccggtttaaaatctttaatcgaagcttggtaaattctcaaatttgtcggcgtcacttttccatgaattgattcaacaaattggtccaaatcatagaaataggctgactgagaattttcacttagttctttttgatcaataaaacttgcaataaattctttcattttggaatcatctcgtattcatttgaaaaattatgcatcagcgaattgatggctttgaggatcgatttccgcgtaataatcccttggaaataaccttcttcatccaccactgataagaaggagtcatccaccaacttgtgaaggacttctgtcaaattgaagtctaagccgatgaccccaacctccttctttgcaacgtctacgatatccatcgaagcaaaagcctcctcaggaatctcgtgtttcaattgataagatagaatatccgttagggagatcgtccccacaaacttgcgttcatccgtcactaccgggatgcgactatagctaatctggctcaacagcaagaccgcatggtctacattgtgggtatcaatcaagaccgctaaatttttggcaggagttaagaacgtctcttcctgcgccagcaagaaacgttcaaattcctttgctatcatctgctaaactcctttgtcaattcagggtacaactcatgatctcgcgtataatactctaccttgaagttcgaatcggtaatctctatcttggcatacaaacactctcgaatcaaaccacgaggttggctaacagatccaggattcacaaagagggttcttccttccttccaagcatctgggatatgaaggtggccgtatagacagatatctgcttcttcctcttgagcccacagatccaatttttgaaaactaaaattgatctggaagagatggccgtgggtctggatgatccgtgttggccctagttgggtcaccaagcgttccggatagccatcataaaaatccatatttccttggacaacgtggatcccttcccagacaggatcgtcactttttagctcagaatccccattgtgaaagatcccatcgaccttacctaggtatttttctttaatagcttcaacaatggagcggtctccatgcgagtcactcataacgatgattgtttgctttgccatgatggaaatacctccaataactttttaacagctaaagcacgatgtgattgtgtatttttttcttctagcgttaattcagcagcagcacggcccgtttccccaactaagaagagagggtcatagccaaagccgtgttccccttttggctcaaaattaatatatcctggccaatctgcttccaccactaggctttccttgcctggtcttgcaaccaccaaagtcgtatggaactgagctgaacgatctttcaagtcaaaaaccatggccaattcgtgcaacaatttcgcattgttttccgcatctgtcgcacctactcccgcaaagcgagctgaccaaacccctggtaagccacccaagatatctaccttcaaacctgaatcatccgctaaaactgttttcccagttagctctgcaatcgtttcagcttttaggcgggcattctcttcaaaggtcatccctgtttcttcgacttctggaagctctgggtattgattgagattttccacttcaaagcccagcttttcaaacatattacggaattctttggtttttccctcatttcgagtcgcaataagaatcgtatctttgaccttgtcttgacccaagaaggcttccaaatccaccccatcacttggcaaatgcaaatagagcaattttcctttttcaagcaagagcaaagctccttgacgctgtacgatttcaaaagctcttcccttgacttcattcaagatttcggtcaaaaaggtcagaaaacggaaggctgaaccatagcgcatcaccgatagattgagagggaatccttcaggatccttggcaaagagaagttccagctggtctaacagagtggaagcttccgcaggaacttgactaaattggttgtagtctgcatcttctccccattgtgcaatataccaatcttggggatctttgtattcaaatagtttgtcactcataaatttacatgctccacattcactgaacgttctagccatttttcggcaatcgctgcaaagctattggcatttgcagttgtataaaagcggtggatctgctctaagagttcacgactcttattgagctcaaaatagtttaataaaacggaaatatcccgaacacactctgccccactgtcaatcaatttaacatccggtcccatgacattttgaataatgggtttcaacagaggataatgggtgcatcccaagactaaagtatcaacctttccaactagtggttttagggtctcataaaccacctttttggtcacactggatgccagctcgtttgattccactaaaggaacaaacttgggacaagctagactgctgacttccatgtctggtgccagactttgaatcttctctttataaattccagaagaaaccgtcatcggtgtcccaatgaccccaattttttgatgggtcgtcgatttaatggctgcagaagctccgggtaaaatcactcctaaaacgggaatatcaagtttctccttaacttcttcccaaacaactgccgtcgctgtattacaggctaagacaatcatcttgacatttttggtcagaaggaagttcaccatctgccaagtatactcgcgaatttggtctgctggtctaggaccataaggtgcacgcgctgaatctccaatatagacgacatcttcgtgaggaagctgacggagcaattcgcggacaacagtcaggccccctactccagaatctaaaaaaccaatcggtcggttatccatatctcttccttccaaaaggagggactaagaaattcctccaagcccctctcatttattatcgtgagattgccccactcttattttttcttgtttttcgccattgctgatttttgttggttcacaatttggcgatagacttgttgaacttttgcttcgcttggacgttggccgctcgcacctaaaagcgtacgaactgcttcaacattcaaacgtgggtttgatgcaaattctttttcaaattgacgacgaagcaagaacattcctgcaaccatcccaccaaagaaagctaaaataatcaacaaaattcctaaaaagagattcatacaattttctccgatccattatttttacataactatcattatatcagacaatcgcttatttttcaatgtcaaagccgtagagtgtcgcaagataatcttctggtttttctgctcgacgaatcaaacgggcctgcccatcttcttgaagcaaaacttctgccgaacgcaacttggcattgtactgatagcccattgaaaatccatgggctccggtgtcatggatcacgagcaaatctccaatctccgtcacgggtaattcacgttgtttcgcaaatttatcgttattttcacagagacttcccacgacatcgaccacttcagtcggtccctctggacgatccatattggtaatatggtgataagcaccgtacatagccggtctaagaagattcacagctgaagcatcgacacccacataggtccggtaggttttctttttatgagtgactctggttaccaagaggccgtgtgaagccagcataaagcgaccaagctcggtatagattttcacatgaccaagtcctgccggtttgagaatcgcatcaaagacgcggtgtacgccctccccaataatagcaatatcatttggttcttgctctggcttgtaattgaccccaactccaccagaaaggttgatgaagcccaagtggacacctgttttctcgacgacttccactgccaattcaaaaagttgacgcgctagctctggatagtagtcgttggatacagtattagaagccaataaagcgtgaatgccaaactcttccacacccagttctttcaactcgataaaggcttggatcaattgctccttagtcattccaaacttagcttcttcaggattgtccataatatcggttcccagttcaaaaactccaccaggattatagcggcaagaaatgaccttggggatgctagtcacagacttcaagaaagcaatgtcttcataggcatccagattgatagttgcccctaattctctagcataaacaaattcatcggctggcgtgttgttagaagaaaacatgatttcttttccactaaagccgagtttatctgccatcaacaattcgacatagctggcagtgtcgacaccacagtcctcttcttgcaaaatttttaggatcgatggattaggagtcgccttaatggcaaagtattctttaaatccttcattccaagcaaaagcttgatggagggcacgagccgtttcacgaattcctgcttcatcataaagatggaaaggggtagggaattcttgggtcagactttctaattgttcacgggttacaaaaggtgttttcataagcgctcatttctattctttagtcactattagtatagcacaagtcggaagacaaaaaaagccgaggcaactgccccagctcaatctctctttgattagtcgtttcttccgaagatacgaagaaggctgataaagaggttgataaagtcaagataaagttccaaagccatcgctactgcccagcctgtagcaggttgaccatttgtttgatcatagacatagcgaatcttttggttatcccaagctgtcaatcctgcaaagaggaagacagagataatactcaagatatagtccattccagaacttctcaagaacatgttcacaacagaagcgatgatcacaccgatcaagactcccatcaaggcacgtcccataccagacaggtcttttttcacgacgcgtccgatagctcccatgacaataaacatcaaggcactaaccaagaaagccttatagacagtcgcttgcatgtagcgagcaatgataaagctcaaggtaaagccattcaaagctgagtagatcaagaagatcggaagagcagacgggctatttttaacagccttcccacttgcaacaaagaccaagatcaattctacaacgactgctccatagtaaaccattggtgctgttgttaagatttgaacgaagaagtcttgaaagaccgtcatcataaggccagacacaagagctgaaatccctacaccgatccctactaatgaatagattttgttataaaaagcattcaatccactttgttcttggattactgaatcattaaacatataaacaagttcctttcaaatttgtttactacgattttaacatttttcgatgaaaaaatctccttttggccatctttttacgccaaggttctgaagcttccttaacagcccagtatttatccaccatggtcaccacgaaggattctttgtagcgaggcggggcaagggtagccccccacatgtgtttaatgatgatgtcttcttccttggcattgagatctgtaatctttcgcgcatttctcacggcaatgcgtggatggatccaggcgtgactcttggtaaacttagtctcgcgccaatcatagtaaaagaggtcatgtaagagcccgccccgagccgtacttttggcatcccagccaaatttttttgccaatttataactagtatagctaacatgaatggaatgctccaaacgattggaatgaatatggtggggaatgtcggctaatttttgaaccttaggatgctggattagatggcccacataggccatgtattctttgtcacgatgatattgcataagataaccacctttcgttgataggctctcccaataagacctccatcaacttcttcttacaggttaagtatactgctttttctcaaaatttccttaaagaaaacatcaaaattcctgctgctactgcaacattcaaactctctgctcgacctggcatgggaatatgaaccagctggtctgcttgtgtggccatttcctggctgatgccatttccttcattgcccataaccaggataaactgatcggtctgaggaagctgccggtagtcaatagaagcttctgaaagcgtcgttgcgagaactggtagatgagagtgtgtagctcgctccaacagttcttcccgatccagtttccagataggaatatggaaatgactgccctgcatggatcgaagggtcttaagactgtataggtctgcggaggctttcgatagcatgacgccatcaaagccagctgcatctgctgttcgaatcatagtccctacattgccaggatcctgtacatcctccaaatagaggaagcgtccttgtagctgatccggaagttctggctgctccagagcgatctctgcgacaatcccttgcggagtcttcgaatctgccaagagacttaagatctccggagtcacgacggtgactttttggatgtcctctacccggtctaaataggcttctaaaacaaagacctgccgaatcttcgcatgattttctactgcctcttcaaacagatgccagccttcaatgagataagaatctgtccggtattttttttgatgtaattttttagcatttttgattacattattggatttagacgttataatattcatagaactattatagcacaaagaaaaagaagaaatcatgcctcagatagatttcttcgagtcaaggaggtcgcacatgcaaaaggtaaaaatgattgcccaaggacgggttcaaggggttggctttcgctggggagtctacagtcttgctttagagatcggtgggattactggccgtgtctggaataatgacgacggaacggttggcattctggcccaggcagagtctagtagccaaatggccaaattcatccaagaaattcgcaaaggtcctacgccttttgcgcatgtgacttatttagatgttacgctcgcaaactttgaaaactatacagacttcagaattgcaaattaagactagagaactattgtgtattttcaaaaaaaacagtagaatagaaaggtaacattaaaaaaaagaaggaactatttgtgaaaaaaaataaacttgcattacttgcatcgatgggactagcttcgcttgtcttcttgtcaggatgcgtgagtgtcgatcggaaaactggaaatccgactggattgatctggaatcttcttggccgtccaatgggcgaagccatcaaattctttgccaataaccttggcttgggctttgggatcgggattattatcgtcaccttgatcgtgcgtttaatcatcttgccacttggtttgtaccaatcatggaaggcaacctaccaatctgaaaagatgaactacttaaaacctatccttgggccaatccaagagcgcatgaagaacgctagcacacaagaagaaaagctattggcgcaacaggaattaatggctgctcaacgtgaaaatggagtcagcatgtttggtggagttgggtgtttgccgctcttgatccaaatgccattcttctcagctctcttctttgcagctcaacacaccaaaggggtagcagatagtagcttccttggcattgctcttggcaaaccaagcttgctcttgacggctatcgttgctgttctttattatatccaaagtatgctttctcttcatggaattgaagatgaaacccaaaaggaaagcatgcgtaaagcatcactgatgagtccgattatgatcggtgtcttctcattgatctcttcagccggagtgactctttactgggtagtcggtggggtgatccaaattatccaacaatttgtcatcaactacttgattcgtccaaatcttcgcaaacgggtcgctgaggaatacaaaaacaatcctccaaaagcgactagtcaccgcgtgaaaaaagacgtcacaccaactgcgaccacacaaattcaacacaaaccaaaaaacaaccgcaatgcagggaaacaacgcaatagaaagtagtacaaactactaaattctagcgaaaatagagtagcacttgaacctttgagttcaagtgcttttttgataccgttcagtcagtcaacgaagaatatttaccctcacaaggggagtaagagcacaaaaaagcaggccctcttggaaagcctgctttttatagttacgctgttttttctacgttcaaaattttcacttggtagcttccagctggtgtctcaacagtgacaacatcccctgtcttcttaccaatcaatgcttgaccaattgggctttcgttagagatcttgccagcaaaggcatctgcccctgctgaaccgacgatgctgtatacttcctcatctgtttcgccaacttcttggactgtaacagtttttccgatcgcaacttcgtctactgcaacagcatcactatcaacgatttctgcataacggatttttgtttccaagctagagatttgaccttcaacaaaagcttgttcatcttttgctgcttcatactcagagttttctgagaggtcaccatatgaacgagcgattttaatccgttccaccacttcaggtcgacggaccaatttcaattcttctaattcttgttccaatttttctttttctgctagggtcattgggtatgttttttctgccattattcttctctttctattatttgaatgaaaaagctgtggacgcgccacatgctttttctagtttgaacttgcttgtgtcaatttgctattgacgtgttcttcaacatttttattgtgttcttcgtatgtcttagcgaagaaaacttcaccatttttgacatttgcgacaaaatacaagtaatctgtcttacttgggttcaccgctgcttcgatcgctgatactccagggttatccactgggccaggcatcaagccggtattcttataaatattataaggggaatcctgctctgtatcgatcgttgcatcttcttttaaggtcgttttttgaccaagcttcccttctgcataaagaattgcaatattactttgcaaaggcatgtcttggttcaagcgattatagaagacacttgcgatatctttgcgatcctgatccgtcgccccttctttttcaaccaaggaagcaagagtcaatacttcgtttacattgatgttcttgctctcaagtgtttcatagtatggggttaagttttgatccattgccgcaagcatctgatcgatcatctctttcactgtggtatctttcccatagttataagtagctgggaagagataaccttctaaacggtagcgaacaccagaatccttacttggcagattcgccaagagcttaggatatttggccaccatcttctcaataaaggcatcatcttggacaaccttcaagaaatcttctttcttgaatggagtcttgcctgccttcttagtagagacatcggcggtgatagccgacgcaatctgatcaatcgtatagccttctggaatcgtgacctttccaagaactggagcctgaggagttttggttccctcttcttgcagtttttggatgatagtttctagatccatgctcttttgcaagttgaaataaccggatttgaaattgctataattcttgaacttggtatagtagttaaagaactggccatttttcacgagcccttttttctcaaggatcgcgccaatctcacgattacttgaacctgccggaatctcaaccgttacgaattctgttgcatttttatccattggtttgacagctgaatggatataggttactgcaaagatcccagtagcaacgatcacaatcaacaaaaggctgactactgtctgcacaattcgtttagcgattttattttgtttcttttgtttttgttgacgttggttacgagaagagcgcgataagcttttctctaccggttcctgacttggttcttttttagcaggctttgtaagctcgctctgttcttccacagcaggagtcgcctttactggctccactggttcttctttgggagcaaacacagattcttctacttttggaggtgatgttgcttcctcctcctctttcagtgaagaaggggtttcaatgcttcgatcaggtagatcatactctttttcgatctttagaagttgctcattggcctcttctaagtctctgaggatctgctctttgaagcttaataacttctcactgtcttgtgatttatcagtcaaataattgacctccctcatcataatccttaatattatatcttaaaagatttagaaaagcaatacaaatcgcccttcttcttcaaaatacctatttaattaaggttttcattttcccagaccagattgtaccaaacttcgcccgcatattgggattctgaaagaccctcattggtaaatccttgcttttcataataaggaatcaaataatcatgacaggtcaaattgattccttgacggccctccttaatcacaatctctttcatcgcttcaagcaaaagggttcccactccaagtccttgggcttctttagcaatggatagactcgtaatggaaataaagcccttttctaaatgacttagatcttcaacctctgaaaaagaggaatcgatcaaatagcgctccggtctaacaggtccttctaaatagcctaaaatctgaccctcgcactcggctactagaaaagtcgtttggatcttttcaatgtgatcttttaaaatctcacgcgcaatcgcttcttcttctgagaaattttcaagctcaatgcgctcgatggcatccaaatcctgcagctctgcctgtctaatgtgaatcttttctttcatcatttactccttctatcgttcccaaaccatatggatacctcgatcagactcagcttcatctcgaaatccttgctgggaaaaataagatagtaagtcttctgaacaatcgatccaaatggcttccttttccttttgaacagctagatcctttaaagcagcgattaaaatagaaccataaccttgaccttgaaaggccggtctcactgctaatcgcaatacgattaggtttccttttaaaggctggtcttctgtcgccaacaagtaagccacagcatcccccgcctgctctgcaagcaaagaaatggcttccttcgaacctagcgcttcctcaagaatggctctgtgctcctttccttcattgtcatgaagttcttcttctagcaacagcaactgttcttgatcagctggggtgattgatcgaattatcatcctgctttcctcatctcatactccttcagtggacagataaatttgagtctggaaccaatcgattccagactcaatcatctcttattgtacactatgtgtcaaactagataataatcgctcaaatgagtattcataggtttgaatatctccagctcccataaagacatagaccgcattatcatggtcaagaagaggagaaacattctcagctgtaataatcgctgaacgtttgacaatttttgcttccaaatcttcaactttcacatcgccgtgatcgacttcccgtgcagaaccatagatctgtgccaagtaaacagcatctgcttgattcaaggcttctgcaaattcatccaacaaggcaatggtccgtgtaaaggtatgtggttggaaaatggccacaatctctttacttgggtatttttgacgggccgcatccaaggttgcaataatttccgttggatggtgcgcaaagtcatcgatgatgattgttccattgactactttttcagtgaaacgacgtttcactccagcaaaggtcttcaaatgctcgcggactaaatctaagtcaaatcctgcaatgtaaagcaaaccaatgactgctgtggcattcatgatgttgtggcgaccaaaagttgggatatggaattgccccaaatcttctccacggaaatgaacgttgaaggttgaacctgtcgttgagcgaagcaggttacttgctacaaaatcgttcgtctccttatcaaaaccatagtaataaattggtgctgatgaggtaatccgacgcaattctttgtcttctccgtaaatgaagagacctttgctgatttgtttagcataatcgttaaaggcattaaagacatcttccaagctcgtgaaatagtctggatggtcgaagtcaatattggtgatgatgctgtattcaggatggtaaggcataaagtggcgttcatactcatctgattcaaagacaaagtatttggctgccgcagagccacgacctgtcccgtcaccaatcaaataactggtatcagtgatatttgataagacgtgcgaaagcatccctgttgtcgaggtttttccgtgtgctccggcaacccccatactgacgaagtcacgcataaattcaccaaggaattcatggtagcgtttataggttaggccatgctcatctgcataagcgatttccacattgttatctggacggaaagcattcccggcaatgaggaccttgtcgccttccaaatttttcacatcaaatggataaatttgaattcctgcctgttccaagccacgttgcgtaaagtaatacttctcaacatctgacccttgaaccgtatgtcccatttggtgaagcatgagggctaaagcactcatccctgctcctttaattccaataaaatggtatgtattagacatgttttctccttattcttgatctagatgggttaaatccaattcttgtttgattggctgtggtttcaacttgtgctgatctttattgtatatttggctagtctttaagaaatcataattgtttttcttttcagtcggttctgccacttctggttctcctgcagattcgaactctgcaaggatcaactgatcttgtcgcaatcgtttgctgtatttcaataattcacccggattttccttttggaaaggagccgttggctggccaggttttcgttcagaaataaatggttttttccgcttacttgtagtagctgctggatccgttgtcagatagggggctgtgcgtttctttttcagatcttcacgcgcacgctctctagcttcctctgcataacgattggcagggctttttttatcaatcggctctttaaaatcaggttttcttactggccgtcttttcggtaggggctcttctagtggttgatggtaagggtgcttaggtttggtattttcagcaatcggttgccattccaaataatttttatccacatagtcgcctgtaatgttactaatcaaatctgtttcatcgtacaggttcatgtggggcatctctgttaacatcaactcattatcccctacttgaggaaaatatttttctgtcatgctttcttcctttcgacactccattaattataaactattcacagaatttttcaagctattctgacggaattccaagaatctcacgaatttcctcaaccgataaactggatcgtgtttccgttccatctaaaatcgttgagaccaagtgtcttttggaagcttgcagttcttggattttctcttcaatcgtaccacgagtaatcatgcggtaaacttcaacattttgttcctgtcccattcgatgggcacgtccaatagcctggtcttccactgcaggattccaccacaaatcgactaagatgaccgtatcggcaccagtgaggtttaatccgacccctccagccttcagagaaatgagaaaagcatggcgctcacctgcattaaaggcattggtcatttcttgacgatctttagcgggagtagaacctgtgattttaaaggaggtcataccaagctggtcaatctcctgctctaggatatccagcatgcctctaaattgcgagaagatcaaaacccgatggtcgccatccttgatttgccccaaaagatctcgaaggctctccaatttcccactatctccctgatagtcttccataaagagggccggagtatcgcagatttggcgaaggcgcatgagaccagagagaatttccaccttgctccgatttagttcctcttcactagagcttcgaacccgatcttgaatttgttttaattgagccaaatagatcgttttttgactttcatccaactcattgtgataggttgtttcaattaagtccggtaattcttggagcacttcatcttttttccgtctcatgacgaaaggtttgacaaatcgcgcaatggtctcaggactcaatttttgaaattcttttttagccggaaacagccctggaagtacaatttgaaaaatagaccagagttctcccacatgattttcaatcggtgtcccagatagggcaaacacatgcggaacctcaaagccacgtaagtgttgggcaatcttggtttgggcatttttcatgacctgggcttcatctagaatcaagtactcatactgattcttctggtattcctccacatcttgacggaaagaagcgtaactagtgataaccacctgtggattggttgcgatgagttcatctcggtgttgcttgagaccgtagacgactgccacttccatctgaggagcgaattttgaaaattcttctttccagttgtagatgagactggacggtgctagaatcaagattttagtttcagttttagagacactcgttaaaaatgaaatagtctgcagagttttcccaagccccatatcatccgctaaaataccgccaaaaccataatgatttagcatggagaaccatttgacccctatttcttggtaatccctcagggtcgcttggattgtcatctgagggaggtggtaatcttctggatgagtcagatcatgagccaaatttcgaaattcatctgaaaaatgaacattgtcttgatctgccaacaaatcagatagctgataagcagcaatccggcgagcatgtagtttcccacccttgctcattttagctcgcagatctgccaaggcccgactgatcttcttggtttcttcatcaaaaacaaggaccttccctgtatggctgacaaaataatcttcttgccccaccaaagctttgagaacctggtccacttcagctggatccacactttcaaagtcaaaaccgatctccagtagactgccattggttttaacatcaatttttggacgctccacttgataaagatctaaaaggctatcagagagggtaacctctcctaaggcttcaaaagtcgggatctgttggtgaaagaatggatagatttgctcacttgataaaggacttctttgggaagaaaagtcgtctgtaaaacctgctgctagcatggttgaaaagacttcttgctccttatcgaaatcactggaataaggaagattgaggagttcctcacgcgtggtcaccgcacgatcctggtattgaaagaccacgtccagtaaaacggtctggtcctgcgctagatcaaaatgaaattctggagtgaaatcgtggattaaaaagctggtcggagctgttattttccccagttttttgaactcttttaaactataggaaagctttgtttggtccgttggatcaaaatgcaggcgttttttgcgatcctgatccatcggaagatcttggatggccttccatagggtccgctgttggggcgtcaggtgatagaagacaccatttcgaaacaggtaaacagcagactcaacaaccttcacttgtggctccgtaatgatcaattcgtaaaaatcaccatggtcttccacctgaaaatgaaagagatcttcctccccatggacatcctgaaaatggacttcttgaaaatcatacaagctatattggaagaggaaggaatccaaattcatcagtaattccacagcttcttcaaagagagtcggtggaaaataaagatggcgtccagcattgggaaagaaatcttgctctttcgatccaccatctgtgaccaagccttgtaggaaattaatcacatcctgactagcctcatcaaattctaagtaagaaatgggttcataataacttttgccaattgcaaagtgtccttctttctgaagagtctgcaaaaaagctagcacatctctgatcacataagaacgctcgtctggcaagcgacgaatgcgaagagtccacaagaattgaccagagtattcatcctcctgcccaacggctgataagacatagcgggtttctttcttttcgatttttggaaggacctggtctaaaaacaaacttccaaaagataccttctcctgagtttcctctgtcacagtggcatcttcttcaagacttacaagagctgctttcccactgtcatcattcttcaaaaaagcttccacagctgccagatgcgtacagaattttttcttttgaaagaaagcacagctacaaaaaacggcatcgtcatccaaactgtaacgcaagctttcttcttccacccgaaaatataggtatttttcttttacttcctgaagggaaactttcccagcttcatagagaaggctcccttgtgaacgaaccttcccaggaattaattttgccatgtttaccaccttcgattaatccctttattataccatatttaagcaaaaattagaaaaaatagttatcatcttgaaaggattttagcccgttttttacttgatttcgtaacagagttacctcaatcagctatccatgatttttctcttttaactttttgagcgaacaatagacagaatagctaaatagagaggagaaagatccctatagcccacagaaaaagacaaaaaacacgaccttattttttaataaaatccccagcaataggatcaagagctccaagcttacgatcgaaccgagaaacaagagatacagatagattttaaataataagtacacaaacctaaagctctcatgatgttcatgagtttactcttctcaaccttaaaaaagctaaggaataaagcatatccggactaagatactacgcatctgactatcctctacttcattttaccagcttattaaaaaaagcaacgcttatgcgctacttttagttgttttcatagttggaagaatgagcattttatcatttgaaatatacttctccactttgatccatttgtctcgtattccctacttccgttttcgcgcaatcaaatggattggagttccttcaaaaacaaaggccttgcgaatttggttctccaagaaacggaggtatgagaagtgcatcagttcttcttcgttaacaaagaccacaaaagttggcggcttggttgccacttgtgtcgcatagaagatcttgaggcgttttcctttgtcggtcggcgttggattaatggcaatggcatccataatcacatcgttcaagacagctgaaggaatccgtgtattttgactctcactgatctgtttgatcatctctggcaacttgtgcaagcgttgtttggttaaggcagagacaaagacaatcggcgcataagaaaggtattggaattgatcgcgaatgtcatcttcccactgcttcatggtatggttgtctttttcaatggtatcccatttgttgacaacaatgatcatacctttaccagcttcatgagcaaagccagcgatccgcttgtcatactcccgaatcccttcttcggcattaatgaccatcaaaaccacatctgaacggtcgatggcacgcatggcacgcatgacagaatatttctcagtgttttcatagattttacctgacttgcgcataccggcggtatcgatcatggtaaattcttggccatctgcatcggtaaaatgggtatcgatggcatcccgtgtggttccagcaacagggcttgcgatgacccggtcttctcctaagatcgcattgatcaagcttgatttcccaacatttgggcgaccaatcaagctaaatttgatgatatctggattttcttcttctgtttcattcggaagattttcaatgatggcatcaagtacatccccagttccgatcccgtggacagaggagaccggtagtggctcacccagtcctaaggcataaaagtcatagatatcattgcgcatctctgggttatccaccttgttgactgcaagaatgaccggtttatgggtcttatacaagatacgagtgacatattcatccgcatccgtgatcccttcttttccagaaacaacaaagacgatcacatctgcttcgtccatggcgatttctgcctgatgcttgatttgctccataaatggggcatctacgtcatcaatcccccctgtatcaatgatactaaattttcgattcaaccactcagctgttgcataaatgcggtcacgagtgactccttctacatcctcaacgatggaaatccgctcaccggcaatccggttaaagagtgtagattttccgacattgggacggcctacaatcgcaatagttggtagggccatgatttcctcttttctaatgaaaggcgagatttcggttcaagaacgcctctcttcatttcataatagtttgtgtttttctagtagttttttggtctcttcttgttcaggttgaccaaattgagctgcaaggcgctcgctccagctgtctgttacacgcgctccagcataatctgcctgaaccttgtcataggcagtcacaactgataggtcttgttcttggtattcttcttcaaaagcaacctgctccaatggcaagcgtggtttcactgcatgttgctggttgggtactccgagagcaatcccaaaaacagggtaggtatagtctggcagacggaagagttctgagacttcttctgaacagtagcgcaacatgccgataatcactccaccatagccgagactttcagctgccaatagcgtattttgagctgctagagccgcatccaccgaggtgatcagtaagttgtccaccccttcaggatggaaatcctgctcatggagtttgacagctttttcagcgcggtttaaatccccaacaaagagaagaaagacgtctgattggcgaatcgcttcttgaggaagcaagtcgtaaagagcttctttcttttccttgcttttgaccacaatcacagaataagactgaaagtttttccaacttgatgccatctgcccagctgataagatttccttgagatcagcttctttgatggcttcttccttaaaacggcgaacagaaaaatgagatttcattaaacggatggtttcattcatcggcgattcactccttccaaatggatttccttggctaaaaatttcacgcgttccatgacacgtttggcctgccatgtttcatctccattgcgcgaaaccgcaaaatgacgctccaactcttcaaaattaaagttagaagtaaagaaggttgggagattttcctgcatccggtgttgcagaatcacctgtaaaatttcatctcgcacccaggctgacatctgttccgcaccgatatcatcaagaattaaaatttcggcttttttcacctgatcgacggtttctttgaccaagcccgaactgatggcatttttgacatcgatagcaaaacttgggaaatgaagtagggtagttgaggcctggcgcttttcggataaatcatgagccaaagctgccatcatgtagctctttcctactccgaaatcaccatagaggtagatccccttttgatattcaggatagttggccacaaaattggctaattcttcaaaagcctcgaaacgtcctttatcatcgagctctaccttggctagactcgcttctttcaaggtcgaagggagattgatcaagttaagacgttggttgattgcagctcgtttttgggcttcgattaactctggcgtttcctcataagcgacatccgcatagccttcattcatggtgaggatgggcttataacctttggcaatataatccgaatctcccaataagaaacggttgcgttcactaatgtattgattaaattttgaaatactacgtcgaatttcttgctcagacaaagactggtccttaataaaggcagcaacttcttgatctgccaagatctgtgcgaccaaatcctcatagttaaattgacgcgcacggttcatgtgagacatggtttgacctacactttccatctactcacctccttgattcagtttttctaacaggcgttgtttctctttagcaagatccaccttttctgcttgactggtctgattttgataatttggttgactccacttgggaacattgctgtgcttgcccttggctgatgtaggactcgtccccttgtttccttgagccttagcttgctcctggcgttctcgaacttttaaaatcgctagttctgcactgttgaccccttgataagaaaaatcatttcctaccttcaaagcatacttttcattgagattagcagactgagtcttgttaaaggtcaacaataagataatattgatcacctcatctagtaagcctagatcagctaacttggataaagtcttgcgttcgctctgcgtaatggtcgcattgcgcgccttcttaatctccgctagaaattgtaggctggattttgccttagcttccctcagaatagtttcttcctgacggctataggacattcgtggtcgttcctggctagcctgagccaacttttgcttcaatctctttggtgagacaatccggtctacagctgtttctttggctaaaagataggtttcataccaggtccattgctgctcttctgcgatggcaaagagggctagggttgcttctccttcatccgcaaaacgaagtccatcacgccccatcattcgcttaaacatctccatatcaaactgctgtttcttacttggaacaacagtcacttccccagcatctagtccaaagacttgcgagaaggaaacttgccttctactccctaaagagcgctctgggagcaaatcttctacggccttttccccgattttcttttcaagcaagcgtttatagacggcattggaaaagaattgctccgcctcaagaggagcgtgcaaccggatcgcgatgccagcttcctcctcaaagatatcgatcaatcccatagcaatcaaacgatcaaaagcaagtaacaattgaggaaaccccatatcaatgtggtttaagatttgggcaagtagatgtttcttttcaccttgatcataagatgcgagcagaaagcgatagaccgtcacggtttccatctctaaaataggcaggtaatactgctctaatgcaggccctgccggtggaagaatgttattttttaaaaatgagaacggagtattgggcttcatctatttttcctttttcttcttggttcccttcgtgatttgtttcaagagggtctctaattcaccgacatccttgaaactccggtaaacactagcaaaacgaacataggtgatctcatctagatcagctaactcatccataaccaaagaaccaatacactcactgttaatttcattatcgctttggctacgaaccttttgctcgatccggtttacaatttcttcgatttcatcactggatacaggtcgtttttgtgccgagcggataataccattaaagattttatcacgagaaaattgctcacgtgttccatcctttttaacaaccactagggtccgttcttccactcgttcgtaggtagtaaagcgataatggcattcttcgcattcacgacgacgacgaatggtgttcccgtcttcagcttgtcgactatccaccacactagacttacttccaccacattttggacaacgcatttgctacctccttaaactgttttaacacttcattttaccataaaatgaatcgtaaagaaagcagaagaacaggagaatcccctatgcttgctcctcattgatccataaaaaagagtcgaaggacgattgaataaaatcgttttcctttcgactctccatttatattaaagtgataattcagcttctaagccatagtgatcactgacatggggtttgttttgatcatcaaaaatgacatgtagacgctggatgtcccattctggacttgcaaagacgtaatcgattcgcaatggaacttgattatccgtccagccatcgattccaggacctacagtataagtcccctttgtttctttggcttcgataaaactatcttgaagttttagcgaactggatagaatcgtttcatacccttcttgaccagcaggattattgaaatcaccagctagaataaaaggtttgcctacttggctgaagtagttctcaatgcgtggccactcaaattggaaacctttgtcccaccaagaaagatggacgctggcaacagcaatctctttgccatccacacttgtatgggcaacggccactcgacgcgtatgatagtccgttggatcatccatattggataccaaaatctcatccgccttcaagggttgacgcgaaagaaccgctacaccctcattgagatgatcataaccaatatggttgtaggcccaagtccaataatagtggagtccttgagcagctaactcttctaccaatacgcgaacaaagtgatctttgtgaatggctacagatgatggcaaggcttgataatactcatctgtttcgactgcttctgagcccatttcttgattgacctcttggaaacagatcacatcatattgcgcttccaaaatttgttccttgagggtttcaaatttttgctgagcattctcttccatccaactatgggaatttaatgttaaaaatttcatcccctgatttctccttctctccaaatcaagaaacggcaagaggccgggtgcactgccccaacctcattttctttgccgacgtctcttataattctactgttgcaactggagcatttgctgccaatttaccagtatgttcgaccttaacagatttaatcgcatctgcatttgtgaagacaacaattgttgaagtttcacgacctgcttcacggatcgcatcaaggtctgcttccaccaagaggtctccagcagccactgtttgaccttcagtaactttaacctcaaatggttttccttcaagactaactgtatctagaccgatatgaaccaagacttccaaaccattatctgttaccaaaccaagggcatgtttggttgggaagacgctagtaactttaccagcaactggtgaaacgatatggccattttcaggctcaaccgcaaatccgtcacccatcattttttgtgagaatacaggatctttcacatcttcgatgttaatcacttcaccatctgcaacggagtgaacttcatctgttacccctttaaaggttgcttcagccttttgaactgctgtcatttggctaggaagtgtttcaggaataacttcacctgaatcaagtacgtcttggatatcagatttcaagacgtcagctttaggtccgtagatcgcttggaccccttgtcctttcatgacaagacccatagcgccttcagctttccattgttcttctgttccgactttttcagcgtccttaacagttacacgaagacgagtcatacatgcgtcaacgtctacgatattggcacgtccaccaagaaggttgatgatgttaatgacttgtgagcttgctgagcttgtagcagcacctgttgctgcaccatctcctgcaggggcatcatcattttgttcatagttaccgttacgtcctggagttgcataattgaatttcttaatcatgaagttagcaatgaagtacatgataaaggcaaataggactgttacccatacaaagttaaagatatctaatgccaaaccagcgttgatggccattggggtacgtgtcaagaactcgattgaaccgaatgagtggacacgaaggtgaaccaagtcagccattgcaaaggcagctccttgaacaaaggcatagattaggtataaaggtgttgcaatgaacatgaacatgtattcaattggttcagtaacacctgtcaagaatgtagcaagggcagttgcaaaaagcatccctttgtatttttctttcttatctgggtccacattgcgatagatagcaactacaacccccatcaagataccaaatgatccaatcatttgaccaactttgaaacgagctggtgtgtacgcatgaagcaagtgttggtattggctaggatctgccttcttcaagttaacaaggtctgttacccaagctaaccaaagtggatcttgtccaaatacagttgttcctttggcagcacctgtaagaacttggtagctaccacccaattgagtatagttgattggaatggtcaacatgtggtgaagaccaaacggcaagagaagacgttccaaggtaccaaacaagaatggtgccaaaactggagctgttgattgtgagttggcgatccagacaccgaaaccattaattcctgattgaactactggccacaaggctgccaaaaccaaggctgtaatagctgaacgaacgataacaacgaatgggacaaagcgcttcccgttaaagaaagaaagggcttctggaagtttacggtagttatagtatttattgaaggcagttgctccaacaaaacctgagataatccctacaaacacccccatattaagtgccggtgcttcaaggacactaatgaagtagtctgcaactttaattgatccacctaaaatcgtgtgaacggtagcctccttatcagccaacattgcagatgtaactccaaaaactgcacctgtaatacggttaatcaagatgaaagagagaccagccgcaaaggcacccccagcacgctctttggcccagctaccaccgatagcgagtgcaaagaggatgtgaaggttaccgataaccccccaaccgatttgttcgagaatcccacctgtaataacaagtggagataaattcgggttgatcatagggattgatttcccgattgaaatcatcaacccagcagctggcatgacagcgataacgaccatcaaggccttaccgaacttttgccagaattcaaagctaaataaacttttgaatgatcctttgttcatcattcaacctccttatattgtttaaggcttttgttttaaagaaaacgtttgcgcttaatttgtttctagtataccacattttaaaaatttgtaaagccttacattcattttttctctaaattttatctttttttatctttttttagccaaatcctttttaaaacccatcctttccaaacgcaaacgtttcccttgagtcataaaaatattcgaaccctctaagggttcgaatattttattctaatgtgtcttgcatggcatagccaatcccacgaacggtcttaatatagcttttttgaccgggtagatcaattttcccacggagataacggatatagacgtccacaatattagtctcacctgtactctcgtacttccagacactctccaataactgatctcgtgtcaccacccctttgcttcccatcagagtcgctaagaggtcgtattctctgcgggtcaaactaatcatgtctttcccacgatagacggtatggtgttccacatcaatgcgcaaattgcggtatgatgttgggattttcatctggctacaatgttggtcaatataatcacgtcctctaaaaatggctgtgatcttatctaccaaatcgctgataataaagggtttgaccatataggaaacggcaaagcgctgaatactctctttgtgctcagcaattttttcgcggctatccaaaacaatcaaaacagaagctgggcgaatccgactaatttcctctgcgaatgtttcaccagacatatctgacaaatcgtaattaaacaagatcagatcatatttggtcgcagcaatcaaggccagacccgcttttccatcctcgaccacatcaacttgatacccttctttttgaagttccaaatcaatgaagcgagcgatttgcttctcattttctactagtagaactcgtttgaccatagagcaagattatttttcgtcgtaccaagaatagtggaaggtaccttctttgtctttacgttggtatgtgtgagcaccaaagtagtcacgttgtgcttggatcaagttcgctggaagatccgctgaacggtagctatcgaagtaagtgatggctgctgagaaggttggtacaggtacacctgcttgaacagcaagagctacgatatcacgaacagattgttggtacttagcagtgacatccaagaagtactcatccaatagaaggttagcaagatctgcatcgcggttgtatgcatctgtgatcttttgcaagaaacgagaacggatgatacatccatcgcgccagatagatgcgatgtccgcaaatggcaagttccaattgttttctttagaagcgacgcgcaattgagcaaaaccttgtgcgtatgagatgatttttgagaagtaaagggcttgacggattttttcaatcaattcagccttatctccttcaaatttgaatgcagctggttttggaagaaccttgcttgcatgaacacgttcttctttgtaagtagagatgtaacgagcaaatactgactcagtaatgagtgacaatggcacaccaaggtcaagcgctgattgactagtccatttaccagttcctttgtttcctgcagcatccaagatgtagtctacgataggtccatcttgaccttcgtcgtctttgcgtccaaggatatcagcagtgatttcgatcaagtagctgtccaattcacccttgttccattcagtaaagatttcagccatgtcttctgcagaaagtccaagcaagtgttgcatgaggtcatagctttctgcgatcaattgcatatcaccatactcgatcccgttatggaccatttttacgtagtgaccagctccatcaggaccgatgtaagtcacacatggttttccatcttcaggcgcttttgcagagatttcttcaaggacgtcagctaccaagtcatatgcttctttttgtccaccaggcatgatagaaggaccttcaagggcacctttttcaccaccagatacaccagtaccgataaagttgataccagagttcgccaactcttcgttacgacggatggtatctttatagaaagtatttcctccgtcgatcaagatatcgcctttatccaaatgtggaagaagggcttggatggttgcgtctgtaccaggccctgcttgaaccataagcatgatacgacgtggtttttcgattgagtttacgaagctttcgatatcatagcttggcacaaagtttttatcaggatggcaagcaattacatcttctgttttttctttactacggttataaatggcaactgtgtagccacgagattcgatattaagggcaaggttacgacccattacggccataccaacaacaccaaagtttgctttagtcatgtgacactcctctttatagtttgcctttattctaccatttttcctcctcaaaagaaagcagaaaatagcttcccgccttctctaagagggagaagatcatgcaagtcatttgatcttaaaaacaaaagtgcccgagaaacagttctcagacacttcctgatgaatgacattaatcttctttagaagctaactcctctgcttcaatgaccggttgttctccttctttgagtttattgaccgtcatattaactccaagagctcctgctagcaattgacgaatatcaaatccagctccttgagagacttggtcgatactttgcatgatatcgcccaccatcttagaagcattgccttccccgtacatggtgatcttatccaccttggttaatggttctgcgacagcacgcgcaatttcaggcaacttgtcaacgaccatttcagtaatggctgcttcttgcattttcttcatcgcttcggccttttggtccaaacctttggcttcggcttccagtttcaagcgaatggcttcggcctcggcacgacctttggcttcaatagcttcagcctcttgcaattgggcaaatttctcagcttcagcttgggctttccgagcttcggcttctttttgtgtttcgaagagttctgcttctgccttgcgttggcgttcaatcaattctgcttctgcagcttgttgacgagcatatttttcagcttcagcttgtttgcggatgttggcatccaattcctgttcacgaaccttaacttcgcgctctttgacttccgcttctttttcctgtttcatgatattagcttcggctgccacgcgctcttgttcacgacgttgcacttctgcctcaatccctttagcggcatctgcttttgcttgggcaatatctgcttcttgcttgagggctgcttgtttgagttttaattcattttgtttttgcgcgatttcaagatcggcagcgacccgtttgtcattagccaatttatcttgttctgcttcaacttccttgcgttcacgttctgctttggctttggcaatcaaggcatctttcttaatggtttcaacattttcaatcccgaggttatcgatgactcccccttcatcagagaaagattgaaccgtaaaggcgatgacttctagacccattttagccaagtctggtgctacgttgtcctgcacttttgaggcaaactcttgacggtcattgaccatcttacggagctccatctgaccgatcacttcccgcaagtttccttccaagacatcttggacagagttggaaatatctgtcgtattccagttcaaaaagttttctgcagcccgggcaatcatttcatcggttgtaccgatttttaatttaacagctgcatcggcacggacgttaatgaagtccagtgttggaacagactcagaagtccgaacatctgtcgagaattgctcaatatcaagataagagcgttgttcgacaaagggaatcataaagccagctttcccacgtaagtgacgttgttttcgaagacctgtaatgaccacgacttcgttgggtttagcgttgacataccctttgaccaacaagatcaatacaagaatggctacgattacaaaagtaatcaaccaacctggaataaataaagtatccatactttttctccttttttagaggtctcccctctgttgtttattaatcctagtatatcaaaagaaggcctttcctcaaagaaaagacctgtatttatgtctaaatttatcaaatgcaatctctagcttattcttcgtcaaataatccttgaagaccagcgaaaggactgttctcttctttcttgatcgcttgagcggcttggtattcttcttcggataggattttccaatcattgccttcgataaaaccttgtccagcctcttcttctggagtgagaaccttgaggggaatattgagcagaatattatccgctacactttcactcaggtcaatcttcccaccttcgattggaaggatcaagtcttcctctagggcctcgatatctgcatcagactgtacatcctcagcaaacacctctgttacaggatagctctcttgaagctcaacaggctccatgctgcggctagatgccaaaacgatggtgtaggccaactggtaatccaagacatagaggcctgtatcataggctactcgtcctgtcgctgtcacattctttaagtcaagaatttctggattgcgcttttgcagatcctttaacaaatccaacccttgatcaaatgctagtccttcaggatttttacggatttcttgtgtatataagttcattcttttgtcctcaaatcttctagatactactagtatatcatgaagctgcccctcaaccaagaagtctcctcaaaaatttgttataatcatgaaaaaagatgaaggagatctgatggcaagagtttacgatttaccattttcaactgtatacacagctttagtccaaaaagtcttacgaaagggtggaaaagagataagccttgaccaaatcacctcgcgattaacaggctattctctggcggaactaaaagaatggaaaaagagtgacggaagttatggagatttctttcgccaagctcccgcctatcaccccaaccggacattgattactgggaaaatttgtggcgtgcaaattgaaacgattcaggatcctttgatgcaagaaattcgccgcttagatcgtctggctgattggttaagtaagggaaagactgttgagcaattggttgaaaaataccagctaaaagaggagaattcatgaaagaaatcggagctatttttcggcaaatacgtgaaagtcgccacatctctttagaggaagctacgggtggcaaattttcgcgctctatgctgtcgcgatttgaaagaggagaaaatgacctgacgacgcaacggttttttcaggcccttcaacaaatcaaaaccagcctcagtgagttctctcatctagcagggatcgatcagcactcctttattcccaaattgttgaaagagcactatgaaaacatgagcttggaacacgatcaagccttgtaccaaagctaccagcaagcctaccagaaacatcagaaaaaagaagacttcttagccagcattattctcaaggccaaaatacttggcttatatcctgaggtacagctcaccgctagccaagaggaactagatttcctctatgactacctcttctctgtcatggtctggggaaattttgagttaagcctattttcactgacctctcctcttttctctagtcagctctatcgacaatacacagaggagttggtccaacgggaggatttcaagcttctcctagattcctctcgtcctgccatcaattctattttccttaatggcttttttctcgccattagttcaaatgaatttgaagatgcaacctattttgatcagctgatcaaggaccacttttactctgagaacgaagcctaccttcggacggtttatctctatgccaaaggagaatttctctatcgaaagggagaaaaagaaatcggtcttgaaaagatggaacaggccatccaggttctctctattctggattgtaaggacagtgccaactactacaaacagggcctgcaagaactgatcaataaatcctaaaaactcacagatctactctgtgagtttttgttgaaaatatgcaacattaattttttcttgctttttaggtttacaataggactatcaagtaaagaaagaaggttcttcccatgatgaccaaactaaaaaaccacttcctccgctttcttctctcacataccggcgtttatctgaaggatcaggaacttcttctctctgatgatgagaaactagacctcttcaaacagatctttcgatccatcaaacaagtcctacaaactaatcacgtgaaggaggaaggctcatgaaactcttagctcgtaataaaatttttgccttacttagtctttctcgctttttgaatacccttggcgctgccatctacaatctggtctttgtggtctttgctgccagtatgccacaaccgagcctagcagttggcattgccaatctcattgtatttattcctagcctctttaccatttttgtcgggatgaaggctgaccgcacgaagaaaaaagctaactggttgatccgcattggctatcttcaagccatcctcttcatccttattgctctcatgaccaagattccgggttacctagccttttcgattgtttgcttcttaaacattgtttcagattgtttgagcgattatcgcggaggcttgcaactccccatcatgaaaaagaacatccccgacgaggatttgatggaggcctattccatcaaccaactacttagtatggtctgctcgatttctggacaagccctaggggtttggctactagccatcagccatcaaaattttgctctggtcgcttcgatcaatgcgctggcttttctcctgtcttccacttgtctcctgatgagaaaaaagcagctgacacatgatcccgtcattgagctcaaaagtaagaattctttggtacacgaatgccaagagatgtaccagaacgccaaaagtatttttgcagatgaggaggtacaccactttggcaagttgctcttctcattggttctcatcaatgccctagggggatccatctctggtatctacaatttgcaactgcttcactcccccttctttcagttgagctttagccaatccctcttgattttagaggcagtgactattttaagcatggtctgggctagcctgacacctcacgattatttttccaagcaaagcctccaccatatcctcctgtggatcgcaggtgggctgaccatgcttgggctcacaaatatcctggtacactgggacattctttcccttctactcatcactttccttggttatcttgtagcaaaaatcaacccaaaagtttccagtcttttaatgagtaaattgcccgctgaaaaattagcttctacctctagctttttgggactgatggttagctttgccatgccacttggaacagctctcttttctagtctagctatctggagccttcccttagcttgggggacctttgccatccttggtttcactaccctcctcctaactaccaaataaaaaatccaccgtttggtggattgagcacgaagacaaactgatcttttatacaattctattaacttttataaagaaaaatactttttattctttagagttattcaatcatctactgaaactttccgccgtgagaaaagtgctagaaacaagcttgtttctagcactcgggagttttgggagtaaaacagtttgggaaactgatttagcctgagcctggaaattaaagagcgagggggttcaaaacgaattgaacacgggctacggattgtgtcaaaaagataagttctcctagaatcgaaagattctgcgtcaaacttcctattttgactttatccgcagacgccctttgtatcgtaatttagtcatggaacttcttcgaagttcgctgacgtccgtactcacctaaggaaaggttctaagatgattgtgtcttcaatctgaatccactgtttggtggatttttttacatttttcttaaacgtgccacccgctcagcaatgggtgggtgggtataaaagagtttttgcaaaccggattctttttttggatcgttgataaaaagagcactgctcgcatcatcgacatgtcgttgcattggttcgcttttgtctagttttaacaaagcattgatcatcccttgaggattccgcgtcaattcaacacttgaagcgtctgctaggaactcccgttgacgagaaatggctaactggaccaaggtcgctgctaatggcgctaaaacgatggcaagcaaggaaaggatcaacataacaatctccaaaccaccgctaccttctcgatcatcatcccggctacggccaccgccccaccacatcatccgtcctccaatactagaaagcatggtgatggcactggcaagggcaactgcaatcgtggagatgcggatatcataattgcgaatatggctgacttcatgtccgataactccctccaattcctcacggttcatcacagccagtagacctgttgtcgctgcaacggctgcattttgaggattagaccctgtcgcaaatgcattcatggatggatcatccacaatatagacacgtggcatagggatctgagctaccatagccatatcttgtacaatatggtagagctgaggggcttgctcttccgttacctcacgcgccccgttcatccgcatgacaacttcagttgattggaaaatcatgctaaaggcatagattccaccaataatcaaagctaggatgacgccaccaagggaagagcctaaccagaggtagccaacggctgctccgatgagagccaagagtatgaaaaaagcaataaggagaatccaggttctccttttattgcttgcaatttggtcaaacagcatattagtctcctaatccgctaaagtccacctttggtactgctttttcttcttcaggcacttgaaggaattcagcctgtttgaagccaaacattccagcaatcacgtttgttgggaaagtttccaatttcacattatagttgcttgtgacactgttgtacaattgacgagcataagaaattttattttctgtgttggtcaattcttcttgcaattgcatgaagttggtgttagctttcaagtctgggtaattttcagccaccgcaaagatgcctgctacttgacgggaaagagcatcactggctgccattgcttctgcaggtgaagaagcttgagccacttgttggcgaagttgagtgaccttagcaagggtatccccttcgtacttggcatagcctttaacggtttcgatcaagtttggaatcaagtcattccgacgtttcaattgcacatcaatttgactccatgcttcgcgagtttgcatccggcttttcaccaaaccgttgtatactcctactacaatcaacacaaggaccacaatgatcccaagaataatccaaatcattttattgaattcctttcatttctttctaccagtatatcaaatttcccttattttgtggtaaaattatcttatgaaaccagaagaattttatatccgtttagccgatctcggcttcccattaactgatcgtcaaaaagagcaatacgaacgctattttgagctcctcgttgaatggaatgaaaagattaatctcaccgccatcaccgcaaaagacgaagtctatctcaagcatttttatgattctatcgcacccattttgcagggcttgattgaaaaccaacccatccatctcctggatatcggagctggtgctggctttcccagcctacccatgaagatcctattccctgagctagatgtgaccatcattgattcccttaataaacggatcaattttctccacttgctggctgaagagttaggtttgagcggagttcatttctaccatggacgtgctgaggactttgcacaagataaggcctttcgtgcccaatttgatatcgtaactgcccgcgccgttgcccgcatgcaggttctctctgagctgaccatcccttacctgaaagtagggggacggctactcgctctcaaggctagcaatgctccagaagagttggaagaagccaaaaatgccctcaacctgctctttagtaaggttgaagacaatctacagtatgaattgccaaatggagatccacgctatatcactgttgtcgaaaagaaaaaagaaacccccaataaatatccaagaaaagcgggtatgcccaataagcggccattgtagtaagatacaaagggctaagaggataaagtcaaataagaggctgggacaaaagtcctagcctctcaattatttttggattgtcaagcaagacgcagtggttgagtgggctctactacgctgatttcatcagcttttacagccctactcaactgtgcggaggtgggacgacgaaatcgaattctaacgaattaccgatttctgtcccactctcttttttatttttgtttcaattctgttcgcagggcttcttgctgctcttttgtcagatgaacgcccttacttgcaacaatctggctagagactttgttagcaaatcttaaggcttgcgtcatatctaaaccttctaaacgagcggatataaaggctcccacatggctatctccagcacctactgtgtcgacgacttctgttggaaaaccgtctgcctcataccagttgccatcataggcaaccgctcctttttcacccaaggtgacaatgactaattgtcctgttctctgatacaagtgttcgatggctggctggatatctctacaccctgaaaaagccagtgcttcagcctcattaacatggagaattggatgcagatcataaattgcttccagtcgatcctttggaatcaagagtccgcgtggacctggtgcaaaaatcacctgaccttctagttgcgaaacagactggaccaatgcaagaccggttggctcctcaacttcaaggccacataagtagatgtaatcaaaccgatctgtctcgagctcttttagccactctgcttggaagctatactccactccgtggtccgataagaaggtccgctcaccatcagactctacaaagcagtaacagcaaccattggccccttctaatgagatgctagaggaaatccctaattgtttcagctctctccgaataaaatcaccatacatcccagaaccgactggcgaaacaaactggtagggttgcgacaaaaaatgaaggatattaacgacattaaaggcacaacctcccacagaccattgctggtgatcaatatgggcatctccttcacgacttggcaaacgatccaagtaaatcatcacatcacaaactgtagaaccaataattaacgcagctgtcatctttttctccttactttgccttctattataccagaggaaagataaaaaacaaccaaccccttgtggagtggttgcttctctttttaatcacgataaacgggttgagggccaaaggtttgggaaaccggcatgatttcaatccgattgacattgacatgcttgggctgttggatcaaccaagatacggtgttagcaatgtcttcaggctgaatggcatgggcatcttgatagagggcttctacccgtttttcgtctcctttaaagcgaacagaagagaactctgtcccttcgcaaagaccgggttcaatattgctgacacgaatcttcttgccagctagatccgcccgaagattgagggagaattgcttgacaaaagccttggatgccccgtaaacattggcccctggataaggcacagttcctgctgtagagcccaaattaataatatagccatcatttcgttccaccatctgaggcaagattttccttgtcagataggtcaagccgacaatattggtctgaatcatggtcagccagtctgcgacctctgcttcataagctggggcgaggcctagagccaagccagcattattaaccaaaacatccactctctcccaagcttttggcaaactggcaagtgcatgatctacctgagaaagatccgtcacatccatttgcaggggataaaaggcttctcccagctcttcttggagagcctgtaatttttcaatgcgtctagctgatccgatcacacggtatccatctgctactaagcgacggcaaatcgcttgaccaaaaccagctgaagctcctgttactaaaatcgtttctgacatgtcattacctccatggattgtaaaaacgtccctgattgacaaagatcaggacaatactcaagaccagaacagctaaggctgatagaatcatcccataatctttcatttccatggcttgatgagaataccaggtccgctttttatttttaccaaagcgacgtaattccatagccgtagaaatgctgtcaatccgctcaagtgagctaaagattaagggagagatgatttgcaaattgcctttgatccgcttgatcagcttggcctttttggacaactccacccctctggcttcctgagacaatttaatcgtttgatattcttcttgtacgtcaggaatgtaacgcagagtcaagctgacagaataggcaatcttgtatgatacgccaatttggttgaggcttgaagcaaactgactaggatgggtcgtcatcaaaaaaatcaaggctagaggtatggtacagacatacttaagagctagattaaaaagataaaagagttcctgcgaggtgatactataggaaccccaccccttcatcagtaccgtttttgccccatagatctctacaccatactgaggggcaaagagatagaccatgacaacatttaacagtgcaaaaacaaaagcaaatgcaagtacaaatgaaatatcccgaaaacgaatgcgggcagtagagaacaaggccagagcacccagaccaattcctaaaaggagccgagtatcataactcaacatggcggcaagagatacaaaaagaagaaagagtaacttactcgcacctgaaaggcgatgaagaaaactcgtcccctcatggtagccgactaatcgatgcttcatgatctactcctttctgttgcatataaaactgcgttagcgccaagggatccattcctaatcgattggctaaggcaaaaatcgaagtctctttgagattagcctcttgtaaaatatccggatgagtgaacagctctgcaggtgagagatcagctagaatttgtccgtctgataccacaagtgcacgatcagaataatccaacatcagttgcatatcatgggtaatcatgacaatggtatggcctttttcttgcaagctatctagaaattccatgatgtcagtgtaattgcgctggtcctgacctgctgtcggctcgtccaagaccaaaatttctggtcctaaaactagtatagaggcgatggtcacccgtttcttttgcccatatgagagggcagaaatcggccatttacgaaactcatagagaccacaagttttcagtgcttgatagacacgctccttaatatcttcttccgatatcccccgcaagcgcaaacctagagcgacttcgtcaaaaatcatattggtcgaaatcatttgattggggttttgtaggacatagcctactcgctcagcccgttccttgacactctcctgcttgatatcttcgcctctagaggtgtattgtccttctgtggtaatgaatccacagatggctttcgcaagagttgatttccctgccccattcttcccgacaatcgctaagcgctgccctttcggaatcgtgagggatatattttttaagatcggatgattttcttgataagcaaaggaaatctgctccaacttcaatagttcttctgcttcaccagttttagtaaaggtcgcttctggaatcacacaatttacatcatccagttggatatcgtccaaacgatccagatgctccaattgattgatatcctgaccaagctggcgaagagctgttaaatagaggggttctcgaatcccattttcagccagaagtgtcgttctcaacaactcatctggtcgaccattaaagagaacttgtccttgattgatcaagataacccgatcaacaggacggtagagtacatcctctaaacggtgttcgataataatggtggtcgtcccctgttcttcatgaatctgatcgatcagatcaataatatcctgacccgacttgggatctagattagccagtggctcatcaaagaggaggatcggactttcgtcaatcagaacacctgctaagctcactcgctgtttttgcccaccggacaaatcttgtggccgatgatccaagagcttcatcaaatccaagcgttctgcccaactctgcacacgctctttcatcgttcccagctcaaccatgtcattttcaagggcaaaagccaagtcttctgcgacactcaaaccgataaactggccatctgtatcttgcaaaaccgtactgaccaaatgagatttctcataaatactgagatcaaaggcttcattcccctgaatgaggaattgtccactactggttcccttatagatattggggataatcccatttaagcactggccaatggttgacttcccagaaccagatggcccaacaatcagaaccttttcccccttataaatggttaagttgagatttttcaaggttggttcagactgtgccttgtattggaaggaaaaatccttcagttcaatcattgcttctttcatttagtttgccttttcccaaaagagcgcaaattggatggctaactccgcgatgcgatccttgctatctaaatcctcatgactagataaggttcggatatcccatttttcttccgagaggtggtcagctgcatagaagaaatggcagagctcaaagcccctataagctgctaaagctgccactgccgaacattccatatccacacagatggctcctgcttcctttcgtcgcttcatcttgtcgatggtttctcggtagggtgcatctgtcgtccacacttttcccgactgataagaaaccttgtgactgtccagaaaggcttggaagagagggagggttttcttatttacttccacttcatcactagccggaagatagtggtaactggtcccctcgtcgcgaagagcagctgttggaatgatgatggaagtcgcttcgatatctcgatctaaaaccccacaggtcccaaaaagaacgagtttttccatcccaaattgaatcagatcctctataatccccacacaggaagcagccccaacgggtgcattaaaggcaccaatctgttggtctccaatagtgatcccatagaccaagacttcaaaattagccatggaggttcttgcaatgacctcatgatcgtaattctcaaggaggcgagcaaaagttactcttgaaaagcaagagatgacaactttgggaaatccttcaattggttggtgtaagtcttgtggattgataatcgcctgtcgattggcatcaaattcttctaacagcatttcgtgcacctctttcattctacttctaggcccctattataccataattagcctagtcattggtttttgatcaaaggaaggagtataaaaaagaactgctcccagacgttagatttttcggatcaaacgtcggagagacagttcactgcgatattttttacttgtcctccaattgcgctaattctagcaaccgttctttggacaattttttaatttcaatttgactagcatctagcagctggaattcatctggctctagtgcttccagtagattcttcagtgcaagagaaccaattggatggtaattttctggcttatccggatctccatcgatcgcaaccaatagaacttgccaatcaatgatacccgctaaacccacaatttctacatattccgcaggaacatgtggcacgcttggcaagaccgtatccgtatcttctgtcaagctatagctggctaagaaggctcctgtctcctcctgttgataaaaacggacttgactgaaataagctgcactatattgaatcttcttgataaaggcagagtaggcttctagtggatggacatggttcaagacttcctgcactgtatcccgatccaaatagactggatgagcgaagccttgtacttcaaactcttttagatctttttctttcgtcacattacccagcgtttctaggataacgacttcataatcaaaatggaaaatagaatcgggagtatagctcacgccatagctggccacaatctccgttcctaatacttctgcgagccgactaagccatcgaagggccaactgccaatcttcttctatcgcaaaagagggcacctgaatctgataagactcttcttcatcaaaatagcgtaactgcagaggaagaccgctcttaccaaatacgatacagttcaagccttcaaaatcatttaagggacgatgaagggtggcagaatcatagttgtaggttgttaacccctccactaatttaagaacttcctgtgctgcgagtacttttgtactgaccccaaaaagttagacaattaatttatccaaaggatttagttctgtattgcacaggactaaatccttttagttttaccttaatgcgtttgttgttgtagtaatcaatatagtctacaatagcttgttccaattgcttaagtgagtgaaacgtcttctcataaccataaaacatctcagacttaagaatgccaaagaaggactccatcataccattgtctggactattacccttacgtgacatggatgcttgaattcccttactctctaggaatcgatgataagaatcgtgttggtattgccagccctggtcactatggagaattgtatttttataatgctcctctgtgaaggcttgttccaacattaatttcacttgtgctaagttgggcgaagtagaaagattataggcgataatttcgctattaaagccatctaaaactggtgataagtagagtttttgactgctcgccggaatggcaaactctgtcacatctgtgtagcacttttccattggtttggatgcttcaaattggcgttgaataaggttatctgctttctttccaatctctccttggtatgaagaatacttccgtttacgacgaatacgtgcacttaaaccaaggaccttcatcagacgttgaaccttcttatgattcactacaaaaccacgattccttaattcaagagtaactctacgatagccgtaatttcccttatgttcatcataaatggcttgtatttccactttgatagcttgatctttatctacttgattcagttgctttaagtggtaataataggctgaacgagcaagtttgataatgtttagaagaatatctaaaggaaactctgttaccaatccttgaacaatttctgtttttcttcttgcttcttttcgtccctcaatcggagttctctcaacttttttagaatagcattctccgctctcaggtactcattttctgcttgaagacgttctaactctgtcatctcttcaggttttttctttggtttacgtcccattttaggcggtctccctcttgttttctcaacaatagtatacccgtttttcttatattgtgctatccaattaggcaacattccaacacttggaagagcataatctagagacacccttatttgtgaacgaccttcaatcagaactttatcaatgatttctcgttttaatttaggagaataataacgattcctcccctttttaacaaactctataccgtaacgatccatcaatttaatcatgtactgaagattgggaatttttatcccaaatatatttgaaagctctttgaagcttcgcccttgttttctaagttcatagacctgaactttatcttcataagttaatttcattataaaacaccccaaaagttagattttttctgtctaacttttggggtgcagttcatttctgatagccaaataagctctttttatttttgattgaaaacacgatactcatttgttttctcctttgtgaaatcgcttacccaaagtatagcacaattttcaaccaatttccatataaaaacagcctgagctttcagactgtttgtttccattatgcaggtgctccatcaagcgtctcaccgatgaccgctaaacgctcacgaacttctgcttgtgacaagttgtgttcttggacataacgattgcgagggtgaacccggcactcatgcgaacatccgcgaagatacttgtcttcgttttcttctgaggtcaagatccgacggttacagaaaggatttccacagttgacatagcgttcgcatggtgttccatcaaaccagtcttttccgacaacgattggatcgacatggttgacatcgactgcaatccgctcgtcaaaaacgtacattttcccatcccacagttcgccttgaacttctggatctttcccgtaagtggcgattccaccatgcaattgaccaacatctttgtagccttcacggaccatccaacctgagaatttctcacagcggactccacctgtacagtagacgacaacgcgtttgtccatgaatttttccttgttatcacggacccattgtggcaattcacggaagttgcggatgtctggacgaatagccccacggaagtgaccaagatcgtactcgtagtcatttcgagtatcaaggacaacggtatcctcatctagaagagcttctttaaattcttttggagacaagtaagcacctgttgtttcaagaggattgatgtcattatcgaaattatcatcttctaaaccaaggtggacaatctctttcttataacgtacaaacatcttcttgaaagcttgctcttcttcctcatcgatcttgaaccaaaggtcctccatccctggaaggctgtgaacgtagtccatgtatttttgcgttgtttcgtagtcaccagaaacagttccattgattccttcgtcagcgactaggatacggcctttgaggccgattgatttacagaaagccaagtgatcagccgcaaattgttctgcattttcaatgggggtatagaggtaatagagtaatacgcgaataggttttgccatgtcattctcttttctaagattaaattatcagaatttttaattcaactataccagtatactctcccaagaaaacgaatgcaatttatttgactgaaaaataaaagcctgggattccagacttttatacgacgaaaccaaagctcctccttcctactcttccttttctaactgatccagataggcttcatagcgtcttttctcaacttttgcaagaagcatcacaagggtattcactccccatacaattggaagattcagtaaaaaggtaataggaagtaccagtaagaattttgaatggaagggatttgcctgatagacagcttggtttaattgaaaattttgagcccagatgaacaaggagagaatagaggttactgctacaattcccgtcacatttagatagctataactgataaatctcacacccaatcgttgacaacgaacagaataatacaatcctgagacgatgagtaaggctaccaccatgattggactgagccccaccttagatgtaaaaatggatcctacactaaaaacagttaaggcaaggaaaagaaaaccagccgtctcagcaccagccttattagctaagccttcttctcgttcatctatgatttgtttgttcagcaattgtaatctcattgctttctccttattcttcatcctctaactctgcctctatcttctcttgttttttccgattgataagagcaagtggtttttcaagcagatctgtcaggagggcaaagacgatgatttctaataaaattttaaccagatacttgggactcaagataaagctcactgcttctctctttccaatcacatccatagctatcatcagcacagcaaagaatagacctgacccaaggcgactcaaccagctatctttttctaacatatctcggatatcaatccctgaactgattcttctcacaaaggcataggctcccatggcaatcagaaggaacatctcagggagataagcgacgagatctaagtccaggatactggatttcacaaaggcaaatagggcaataaagcaggtcataccaaggacaagttctcctgcgatttttccatcaagtagcatggtccgttcatcttttacaattggttctttcttttgtttcatatgtttcctctttctatgttaaaactgttactcccagaacagttgatccagcgtcttatccaaggtcttacaaatggcaaggcaaaggctgagggtcggattgtatttccctgcctcgatcaggccaatggtctggcgtgtcacccctatggcatctgcaagatccccctgggtcatatcatgctcgacccgggccatttttaatttgagatttttcgccacatgcttttcctttcttgtttttataactttattatacactatattttctattttgcaatatatatcttacattttgtaaaaaatatttttgataaacaaaaaagaggctgggaaaaaagtcctagcctctcaattgtctttggattgtcgagcaagatgcagtggttgagtgggctctactacgctgatttcatcagcttttacagccctactcgactgtgcggaggtgggacgacgaattcgaattctaacgaattaccgatttctgtcccactctctcatcttctgtacgtttaatcttttgtcaaacttccatcttttgtttgggtccgtgcataagcaatcaagagaagagaacctgcaacagctactgttaaagcatttaaagaacccgcaacaacaccttgtaggaagactttattggcactttccttgtagatcaagacatctccaaccggagcaatcaagccccagatcacaagattggatacgatttgaacaacgttaaaaacaattaattctttctttgtcacttcccctttgaattcaccgatttgtttgcggaagaaaccaacaaagagtccaaacaaaccacttgaaatgatccaagtccaccaaagactacctgacatagcgtccttaatggcatgaccaatcaagccgattaagaagccaacaattgggccaaagactacactaaagagagcttgaagggcatattgcaactgaatgctcgtattcggtgcaggtgcagggatttgcaacatagcaatcacgacaaagagggctgctccaaccccaatagctacaacatctttaattgaaaataatgatttctgtttcattatgatatctcctattaattttccatttttctaatctcaatatgccaagaagccccaactcctacattataggccttggcaaaggatccctggttgatggcaagaccaacacggtaaagggaattgatataaaggattggctgtccaattcgcacatcggcgaaagacttgccgtaggttacttggttttggtaaaccagcatgtcattgttatagatggtcacttcaaaacgttccccaaattcgggtgacaaatgattgaactcttcccgagtaatggaagtccaaagagaaccaaagcgtacatctaggatgtcaactgcacctttaacaagatcgtcctcaaaaaccgtctcaaccactgggatttccacaatatgttcgacactgagttctggtccgacttcttcaaaactaatatggccactggccaacttagctcctgtataggcgtagacatcacgcccatggaaagtataagaaaattctgtattggctcgacgattcttcacctctgaaatctcacggatagcaacaatccctacatgtttcttgataaaagagagagttccattatccggagtgacaatgtattgatttttagccgttttagctacgacactctttcgtttggaaccgacaccaggatcgaccaccgaaacaaaggttgtcccttctggccagtaatctactgtctgaaagagacggtaactcccttcaaagatattgtagggggtaatatcatgagttaagtggtgaattttaagggttggtgattcttctaaagcaaccccaatcatagctgatactgctccatccaccaaaccaaagtctgactgaagaactagtaaattattgtgcatctttatctccttttttggccaataatggaagaaggatgttcgatagtccccatcctaatcctgcacccaatatgaccgtgaggacaaaccaagtgatggtcgctagatctggtgataccatcacccgattgacatagtctatcgatttaccacgatccagtaacgacatgcggtaactggctggatagaaccacatcatcagaatgggccctgttgtcgcaaaggcaaaaataacaaaagacaaggcatttcgtaaattcgagcgaaaacgaccacttgaagcgaccatctccgcaaaacttccggcgatcaaggctggaataaaggcccctgcaccatgacgtgaaaggagaaagaaggatccgatcacgcagccaactataaagatagatccaactccttttattttttctagaaaatagcggtagatcgtcccgccaaacaaggctgaaaaggcaggagcataaaacatatttccttgatgatcgaccagatttccaactaagacccccagtccaatcgcaacaaaatagaggaagacgaaggctccgacttgtttcatatgattcacatttattctattcattggatactgatcctaacggtggctaattttcttcgaaaggaagtccccgataaattggactagaacgataagaatcaggatcaataaggtcgccacaaagatgacatcattgttaaacatgtttttcccgtagttgatggccaaggttcctaatcctccagcaccaacggcacccgccatggcggtttctccgatcaaggaaatgatggtcactgttgtcacacggatcaaatcaggaagcccttcacgaaggtagacaccaacaatatcccagaaggttgccccactagcttgcgctgcttcaatcacacctccatccaattcggacaagaccacttggacttggcgggcaaagaatggaaagacagccaaagacagcggaacaagggctgctgtaggaccgatggtatttttcaagagcaagtaggtcaatggattaataaaggccaacaagataatgaaaggaatggcgcggaacaaggaagtaatcttatccaaaatttggaaaacgattctattttcgatgacaccacctggacgggtcaagaccaacaaaagccctgtcaccaaacctaaaaatccaccaataatgaaggaaataacggtcatgtaaagagtcaagtaaatagcggttccccatccatactggccagaccaccctaatttatagacatttggtaaatatgtttgaattaactggatcatgcttttctcccatctttcacaatagtcacggaaactcctgcattttctaactcagctttggccgtttccagattttgattttcacctgataagatgaccaccaattctccaacaggcgtgttatcaaggatctcgatgttcccaaataaaatgttggcagatacttggtactgcttgtaaatatcattgatgatggctgtatctgtcactgaacctgcatacttaagatgcgctagaaccgaatcatctggtaagttcttaacaatcgcttgttggttgattttcaccatggcttcatcgattcctgttgcaaccgtgataaagtcttgcgtcaaagcatttttcggatttgagaagatatctaaaacagacccttcttcaatcagttcgccattttgcatgacagctacccgattggcaatatctttaacaatttgcatctcatgggtgatcaagacaatggttaaaccaagttttttgtttaactcttgcaacaaagctagaatttgtttggtcgtctttggatccaaggctgaagttgactcatctgagatcaaaatctttggatcgttggcaagggcacgcgcaatcgctacccgttgcttttgaccaccagacaattgtgctgggtaattttctgcacggtcagatagaccaaccaaatccaacaatttcgccactttctcattcttttgttctttgttcaatttagaatgtttaagagcaaatgctacattttctgcgacagtcatttgagccatcaagttgaagtgttggaaaatcattccgatatcccgacgtttctcccgaagggtagccggttttagggtcacctgatcttgataaatcacatctccatccacagtaatggttccagcgctaggcacttgcaagagattgatcacccgaaccaaggtcgatttcccggctccagaataccctacaatcccataaatatcaccttcattaatatgaatggtcacatctttgacagcttggatctgacgtttcttttgctggaaggtcacatcaatgtggtccagctgaatcattgctttactcataacttgctattaactcctttatcaattcaatatgggtgtaataatcggcgattttcacattttcgtcgcccccatgatcacggctattggcattgccaattccaaaggctgccatcggcacctgcaaagcctcaaataccgtatgcatgggccctgtccccgcagttgttggaagaacagagactccttctctatagaagtctttggccaaccgaatgacatttaaaatcgatggggcactcatatcacttcggtaactcatttcaccgagagtatagaccaattcgacctgatcatagccatttttcttcaattgctgcttgatcttttctaagacatccttgggatccagtccaggaactaatcgcacctccatcttagcacgcgcctctgctggaagaatcgttttaacaccttggccttggtaaccagagccaaaaccttcaatattcagggctggttcaaaatagaaacggcgcaggaattcttttcggtcttccttcaagattgggagggttagaccataggtttccgcaacatcttctggtcctttgttggcatattgctcgatcaaagctagctcgcgttcattgggttcttggatctgatcgtaaatcccatctaccaagattcggccttctttgtcacgtaggcttgcgatggcatttaacaaataccaggaagcagagtccaccaccccgccatagctggaatgaatatccacttctgcactcttcaccaccatatcaaaggtgacgatccccttgctaccaccagaaatttccaactgaccctgattatttcgggtaccttgttcccagactaagaggtctgccccacgcaagtgtttcttgtgtttggccaagtatttatccaagtcagtcgatgcagactcctctgccccttcgatgataaaggtgatattgactggcaaatcgccactttcacgaatgtattttcgaagagctgtgagacgagccgtgatatgccccttgtcatcatcaacccctcgaccgtacatggtcccataatgaactgataaggtaaaagggtctcccgtccaaggttggtctccatcagctggtaccgtatcatagtggttataaaaaatgatggttttggcttcaggatttggcgagaaaaatttggcaatcacaaaaggtgctgtatagctatcatcaacttcgactttggctcctgcagctgtaaaaatttcccccaaatagttggctacttccttgagaccaacttgttgggcaaagatggatttttttgaaatcaaggttcgtaacacttcaaaatagtgttgtgcgacctcatcattttcaaatttacggatttgttccgcttctgttgcaaaaggcatgcattcctcctaatacacgataagaggtagagaatcgcttctccacctccttcatacacttgagatcaaatcttagaagactggttggtccattccttctgaagattcttcgatcactttcttcacattgtctttgtgataggctttgatgatttctttgattgcttttgctttatcagatttttcccaatctttcttagcagcgatcaagttgtaccattgttttgagttgttgtctttcttttcaacatagatagcttttttgaaatcaacgcctgcttcacgaacgaaggtattgttgatgactgcagcatctactgatggaagagcagatggcgtttgtgaagcatccaattcagagatcttcaaatcttttgaattttctttgatatttgacacgtttgccaattgaccatctttggtatccaatttaatcaaaccagctgattgcaagacatacaaagcacggctttcatttgttgggtcatttggtacagcgattgttccacctttaggaatttctttaattgaagtgtatttgtttttaccgttttctgtaccagagtaaagacggattggagcgatgtacgtatctgctactgcaacaagggccttgtcgtttttagagttccagttatcaaggaagttgtagtgttggaaagcattgatatccacgctaccatcttttacagccacgtttggttgtgagtagtctgtaaattgagtgaattccaatttgatccctgttttagcgtcatccaagttcttttgaacttgatcccaacgagctttttcagtgtcgctcaaagtcatgacacctacttttacagttgtttcaccatctttgctagatgattttgaagaaccacatgctgcaagagcaaatgttgcgatagctgcaagagctgttaaaccaagaatttttttcaatttcattttgaagtctcctttaattaaatattattctttaatatcttttgcttctggtaggtaagttccaccaaagtattttttagacagtttttcaagggttccattgtcatagagttccttgatgcgtttgttgacaaatttttgaagatctttatcttcctttgcaataattggatacacataaggttgttggtcgcttggaagctcgataaccttcaggttgtcatagccttgatcacgaatgatggtatccactgagatccgttcgaaaatcttgtaatctgtacgaccatccgctagattagccatgatggtttgaatggttccatctgtgtattgcaagttagttggattatctgaatgttttttattgtaatcttctaattgtttagcagtagatgttccttgaacaacttctgttttcttaccacccaagtcatccaaagatttaatagaagaatcttttggtacgaccaatactaatggattgcgagcatatggatttggatagaggtatttttcttcccgctcttttgagtagctaatgttgttggcaccgatttggaaacggtcactatctaagccagcaaagactgaagaccactctgtcttgttaaagtttacttcatatttgtctgaacctttgaaaatttcacgcaaaacttcgatttcataaccggttagcttaccgtctttttcttcgtaagagaatggtttggttgttccaacagtcccaacttcaatggttttcttaccactggctgatttgccagatgaacatgctactaaagcactggttgcaaggactgcaactaatcctaaagcagaatacttaatcactttttttagattcataggatctccttattcgtttcaggcacataaaacaccattttaaaagtatttttttattttatcaaaaatgtatttacttgcctaatatatattttttatggaggtgatagtttttctttatcacacttctttggctttaaaatatcgcaataaagcttgcgcattttcaacataatagggaaccgacacctcaaaggctgcatcatcgatggtcatgtgatcatgatggaggtctggcgcgtctggctctccgtttgaaccgataaaggcaaagactccaggaattcgctcttggtaaaaggcgaagtcttctccagctgtagatggatttgctggaagcacctcagccaaatcttgtgaagcttcccaaactactttcgttaattcctcatcattaaaggtaacgggcggggtcacaccccactcaaaagccacatccacttcaaggcttttcgctatgtgacgaacgatagaaacaaagtgttctttcaactccctttgcacacttggattaaaggaacgaatggttccttcaaaataacctgattttgggagcacattccaagtagaacccacatctaggtgcgtaatggacaaaacagcagtttcaaagggagaaacggtccgtgaaattaataattgtaagttctgaaccatggttgtgatagccgttacagtgtcaactcccaagtctggtctcgcagcatggctactgacccctgtcacggtaaccttgaatttctcaacccctgccatcatagctccagcattcaaggcaagttgccctgcttttagctggggaatattgtgaaaaccaataattccttgaacatcctccaacagtcctgttgctaaaacatcagaagcaccttctgagatttcttctgctggttgaaagatcaagcgtacggttccttcaagctggtcttcttcttccttgagaagagctgctgctcctagaagactggtttgatgaaaatcatggccacatgcatgcatgactcctggattctgactttggtagggcagatttgtttgttccaaaattggaagggcatcgatatctgctcgaagtgccaccactggttggccggacccaatttctgcaatcagaccagtttttaatccactctctaaaacatgaatccccaactcctctaaacgctcctttagaaaggcagttgtctggtattcttgaccagacaattccgggtgttggtggatatagtagcgaatctctgctaactcttcataagaaaaagacacaagccttcatctcctttcaaacttaaaattattttatcacgaataggtgtttccgtctaattcctgtttcttgggttttgatatagttttaaactatagataaaaacactcctagatctatgtcctagaagtgccaacttccgcattaagaaagatttccctcgaatttttccataaagctatcactattataggctttttctacttcccacttgccatctttcttaacaaaggtcaactggtagtcgtatcgatccggcgtcgtcaagggacgatctgcaagagaagccatcatttcctctctataggctttgttttgagcctgattcgcctcgatgatccctgggtagtctttacgatgttcttgatagaaggtctgcatgtggtttaagatcgtcttttccatgctgactgtctcagaattcaggctaatgactaccttgtctgggaagtattgtttgaccttataggttaatttcgcgcgcttagcattttccttttcataagcatcgataaactgggttacttcttcttcagggaattggtaatcgtgtaatttgcgagtaaagtcagccgcaaatttcgcacggaaatcactggcttcctttttcaaatcagttcccaaaacaaaagcatcatcctttttgacctttcgttggccactgaagtaaacttgattgatgtattcatctgctagaagagtggaagcttccaccttatcctcatactgagaagaatccaccgcaaattttaaaggcttggattttttatcagagctatacgtttttcgttcatactgcacttcatattttttacctttttcgactgggaaaacgatatagccagttaattttttatcctgggccaactgatcactcttaagcaattggaaggcttcactttggtcataaattcctgactgcaatttgaccttgttattatcctcatcgtaaatggtgatatctgaatctgacacgttgatagattctttggcaacatttttaaattctaattgaagggctaaataggtgccgtcttctgagtcattgaggacaggtggtttgatgtattgccctctttttaaactcacctcgacttgaccgtcagatgcggagcttttcgctgctttttcagtctttgcttgctgcgaatttgtcttttgagcagtagttccacaagctactagactcaaggtcgccacagcaaataaggtccatttaaaaatctttttcatcctcatctccttaaaaaagtttttttctattctaacatctttttctagctatgtatacgctatatagtgataactctccctcagaaggcgaggatcacaaaaaggccaagactttcgtctcaacctttttactgaaaaataattggttttggttttacaagattcctttttctttttgaatcatgagatccttgagggaaatcaagagaactgcaagaaggatcatggccatcccgataaaatcaatggcaaagaaatgttcattcataatggcaaaagcaaaaaatacagctgaaataggctcaatcgaagcaagaaggctgcctttgaccgggccaaccaagctagttcctttcaaaaagacggtataggcaaaaatagtcccaatcaccactaagccaactaagcccatcagattatccatgctatattggccatgaaagagtcttttccctgtaaagggaatcatcataagtcctggaatgagcatgccgataccaatcaccaacatactaccccatttttgaattaattgaataggcagaatgatgtagagggcataggcaaaggcagaaacaagcccccaagctagccctttaggagtgattgccaattgattgagttgaccatgggtcgcaataagaaaggtccctgcaatggctaagaccatcgaaatgatttcagataccgtaggagctacccggtctttgatacacgagtaggccaagacacctactggacaaagatactgtaaaacagttgccgtaccagcatttgtcgcatgaatcgcttctaaataggtcaattgagtcattaacaaacccaaaaatgcaaacaagagcaagggcaaataagacgagcggtctgttagaaaggctctcacttttttcttatccgctagaaaggctaatagcaatagaactgctcccgaaataattaaacgaatcgttgtcaaaccgatcgctgtaaatccatgagccatcaggtattgaccgcaagctcctgataagccccaagcgatcccagcaatcaaggtcatgagcgtccccttcatcgtctttgacatagtcccctcccaaatctgttccttacttttattgtatcacaaaaggccgaaactacacgtttcagccttgctttattttatataagtttattagcttattcaggttgaaccaagatcttgatttgggatttatcttgtgttaattcaataaatccttcttcaacgatattttccaatttaattttcttggtaaccaatttctcagcagagaagtaaccttgttccatcaattccaagactttagggaagatgtgacggtaggcaataattcctttgagggatttttcttggatggcgaattcatttggattgatgctcgcttcgcgttcccagatagatacaaccatacattccccagctttatgaacagctgcaagggcttggcctaaaacaactggaactccagtgacttcataagaaacatctgctccaccacctgttaaacgatggatggcttctacgactgtttctccttcttctggacgaacaacgatcgctcccaattcttctgctttagcttggcgttcaggagacaattcaaccgcatagatttttgatgctcctgctgcacggagggcttcaacgatcaagagaccaattgggcctaaaccaaagataacagctgtatctccagttttcaaagcagattgacgaactgcatacacagctacagcagcaggttctgtaagagcggcttgttcatagctcaagctatctggaatcacatggacaagatcaccatcaaggacacaatatttagcaaaaccaccatctgcagcgaggccgacgaagttcaagtttggatcaaggttataatcaccaattaagttgtgctctgcaagaattggttcgatggttacacgatccccaactttgacacgagtgacatcacttccgacttctacaatttcaccagagaattcatgtcccaaagtaactggtgctttttgaccagaataaacatgttcttctgttggaatgaagattgggccgtccaaatattcatgcaagtctgtcccgcaaatccccgtgaacttaactgccacctttacttgatgtggttgtacttcaggtacttccacctcttcaatacgaacgtcttttgctgcatgccagcgtgctgctttcatagtagccataggatggtctccttgttttcatgatttttagttttcttttcaggaaactttatataccacattgtaaacgttttctttctgcttgtcaaggaaaaactgaacaaagaagacaatgaagaaataaacctagtgatgacttcttttcctctccacattacaagactttttctgtatccgacaaacctccaatctccaccccaaaatccaaccaaggaccaggagataattttcaagcgcaccgatcccattgactggcaaatgatagttgagataagcaaataaatgattcgtcccaattccaatcccacctaggatcaaagccaatagaaccgtccgaagataaaaccaatcgtatttgagattgacagcaatgagaatcacaagaactgccacattccaaatcccaatctcccgttgccaaccgacagaaacaccatatcccgaatgacttcccatataggatggaaagaatagctggaagataatcgctccagacatggcgatgataagtaaaataaataagaatcttaacaaccgattcatcttcttcctcctttaagaaaaaactgattaatctcttgacacttgttttctgttaaaacaggaacaccgctactgtttaaataaaatgcaatatagtctaatttttgtgagaatgagatcatttcttcacctgatatagttggatcaagccacacatcaattaatagagatagtgttgtggctgtctctaaaggatatttacaagaaaactcgcccttctcatctccttgatgaatgattattcctacatatttggaaagaatattcaccgtattttttaaagaaaacaacaaaccaaacggtattttttgtgcccagtcaataccagtaagctgttccatattctcattgcctattaaataatctactaattgtaatagacgatctgttgatgaaacttcttcgttctttgacaattcttctagaaaagttgagagggcaatcgtttctttttccattaagagttgtagaatctcttctttacttttgaagtgatggtaaacagccccttttgacaatcctgtcgccgttactaaatcagccatcgttgtttcattatagcctttatttgaaaacaaggataaagccacttgaataatttgatctttacttctttttgattttatttcttgtttcaagtaacttccctccttaaaaaacagaccataggtctgtttttaattttattaaattcagaagactttgtcaattaaattccatttttcatcccctctgaaaaagtaaaaacagacacaaaaaggtgcctgttagaatgtaaacatatactgaaactttccgccgtgagaaaagtgcctgaaacataattgtttcaggcactcgggagttttgaaactttaggttcaaaactaagtcatggaacttcttcgaagttcgctgacgtccgaactcacttaaggaaagtttctaagatgtctttatcatgaatccgacagatacttcctagtaactgttccttttattcactatctttcaacttagccaattcttgagcaagtaacttgagggctacttgtgggttggcttggcctttggttgctttcatgaggaagcctgtgaaggccttgtccgcattccgcttccctgacttgaagtcggctacggctgcttcgttgtctgcgaagacttggtggatgatagggatcaagacttcaggatctgaaatctgtaccaatccagctttttctacgtattcacgtgcgccaccaccgtttttcgccaagtgaacaaagactttcttggcaatcttagaagaaatcgttccatcttcgatgatggcaatcatttcgaccaaattttctggtgtcaattggatttcttccagtgtcttaccttctgcattcaagaattgtgctacttcaccttggagccagttagacacttgcttagcatcgccaccaagggctacagctgcttcaaagaagtcagaagtaactttcgtcgctgtcaattggttggcatcatagtcagacaagccaagctctgccacatagcgagcacgacggtcttttggaaactctggcaactccgtacgcatttcctcgatccactcatctgagatttcaaacaatggcaggtctggttctgggaagtaacggtaatccgctgctccttctttgacacgcataaggatagtgctcttgttggcttcatcgtaacggcgtgtttcttgacgaatgacaccacctgaacgcaagattttcgcttgacgctcaacttcgtattcaagacctttacggacgtttgagaaagagttcaagttcttcaactcagtcttggtaccaaattcctcttggccgtatgggcgaagggaaatgttggcatctacacgcatcgatccttcttccatcttgacgtctgaaataccagtatattggatgacttctttcaaagctgtcaaataagcataggcttcttcaggagaacgcatatctgcttcagatacgatttcaatcaatggcaccccttgacggttaaggtctacgtaagagaatccatctgttccgtgggtattcttaccggcatcttcttccaagtgggcccgttcaatcccgattttcttagttgagccgtcttccaattgcacttcaatccaaccgttgtaaccgattggctcgtcaaattgcgaaatttggtaggcctttggattatcaggatagaaatagttcttccggtcaaagtgcatatgctgatggatatccatattcaaggccaaagcagccttgataccagcatccacaacacccttgttcaagacaggaagcacccctgggaaagaccagtcgatcacattggtattggcattttgctcattcccaaagtgagcagaggttggtgagaaaatttttgagtttgtattcaattcaacgtggacttcaagtccgatgactgtttcaaagttcattaattgtcacctccgaaaataaggggttgttgcttgtggtaatccgtcgttgcttcaaaggcagctgcagcttggtagatggtttcttcagaatacttaggaccgatcaactgcaaaccaactggaagaccttgcgcaaaacctgcaggaatcgaaatccctggaagacctgccaagttgactggaatagtcaagaggtccgccaagtacatggcaaccgggtcatggttgagcgaatccaaatcaaaggctacacttggagctgttggaccaaggataaggtcgtaatccgcaaagactttttcgaagtcttggataataagggtacggacttgaccagctttcttgtagtaagcatcgtagtaaccagatgacaaactaaaggtaccaagcatgatccggcgtttgacctcatcaccaaagccttgactacgagtgttcacgtagatatcatccaagtttttagcatcttccgcacggaaaccatagcgaatcccatcgaaacgttgcaagtttgaagaagcttcagatgaagcgatgatgtagtaaacggcaaccccatatttagagtgtggaaggctaacttcttcgacagttgctcccaatttttcaaagtgtttggccgcattaaggatggtttctttgacttctgggtcgatcccttcaccgaggtattccttaggaagggcaatcttcatacctttgatgtcttgaccaatcttagaagtaaaatcggctacgcgtactggtgcagaagttgaatccttggcatcttcactggcaatgacattgagcaagagggcattttccttaacggttggagcgaaaggtccaatttggtcgagtgagctaccaaaggcaatgagaccaaaacgggaaaccgttccataagttggtttgagaccaacaatcccgttgaaggcagctggttggcggatagaaccacctgtatctgaaccaagggacaaacggacttgccctgaagcaacagaagctgctgaaccactagaagatccaccaggcaccttgctgtggtcccaagcattcttggttggtccatagtaagaagtttccccagatccacccatggcaaattcatccatgttggtcttcccgatgacaatcatatctttggctttggcattggcaacagctgtcgcatcaaagattggctcgtagttatagagcatttttgaagccgcagttgtcaagataccatctgttgagatattgtctttgacagcgagtggaatccctgacaggaggttatctgcatcgattccttttgcatcaatggccttggcttgcgcaagagccgcttcttctgccactgtcacaaaggcattgactgcttcttcacgtcccttgatatcgtcaagtgtcgcttgtgtcaattcggttgctgagatttccttagagacaaggaggtcgtgcaactcttcaatggttttatggttgaatgacattaggcatctcctccatcttctaggatagctggtaccttgatgtagtaattgtctttttcaggtacatttttaaacaagcggtcacggtccgtcccgttctcagcaacatccggacgcaatacggtcttgcggtcagccatggtcgttgttggggcaacacctgttgtgtccacttcttccaacaattctaccatgtcgactatcttcgacaaggttgtcgcaaactcagcagtctcttctggggagaatttcaattttgaaagattggcaacgtgggttacctcttcttgcgtaattttcatcttgcttcctttcgtgaaatgataatttccaataccttctattttatcataattttagcttttcatgttgcattaaaataagaaaaagagatgagactaattgagaactacactcaactaattccatactctttatttattttcacttaaagttttatctaccaagcttgcccctaagacatgcttgaaatgattcaaggcaaactggtgattttcaggagtaagcgatgccactgcaggttccacgacttcgatctgatagccgaggttgtaggcatcaaccgctgtatggaggacacagatatcagtcaagacacctgtcaaaataacggtatctacatgacgttctcgaaggcggatatctaggtccgttcctgaaaaagcagaataatgacgtttgtccatccaaaagacgcgtggatccgctttgtgctccagataaaaatctgccaaagggccgtacaaatcacgtccgctggtcccaatgatattatgaggtgggaagagcttgctttcaggatgaaaaggatcctctacatcatgcgcatcaatggcaaaaaagatataggctccttggtcaaaggccaattgggtcacctgagcaatggtctcggaaatggcttgtgcaggagcacctgccgtaagcttaccatcatctgctacgaaatcgacagtgtagtcaattgaaatcaaggctttggtcattagtaatctcttttcttaatttcttcaaagatatctggaatcaacactttgagataggttcccttcattccaagagaacggctttcaataatgccagctgactccaatttccgaagtgcattgacaatcacagagcgggtaatcccaatacgatccgcgatgatagaagcggtcaactgcccctcgtttcctttcaattcactaaggatagcagatacggcccgcaattcagagtaagataaggtattgacggccatattcactgctgtccggcgacgaatattcttctcatcttcctcgcgttggtagttcaacatttgaattcctaccacggtactagcaatctcaaccaagatcaaatcatcgtcgtcaaactctttatcattccgccaaatgatcaaagaccccaaacgaatcccagaaacatgaatgggcgcaattgtcgtcaagccatcaggaaattcagacttggtctctactggaaagactgtcaaatcatgctcgatgggaaggtttgcttctgtatcataaactaagcttgctgccttggcataatcttctggtaattttttattttgaaagaaagcttctactcggtcattgttagtcttgtaacgcatgaaataaccaagaagggttcccttgctattaataatacaagcattacaattgataatatccgccaattgttgggcaatatcattgtaaggcatctcgacttgcaactgctcatcagtccgtttcaagatggatgtaattttacgtgtcttttctaataagtttgccataataaacctcgcatatagtcagctaaagtatatcatataagtgtgggaatttcaatcaaattatctgaaaattatttatttttcctacaattatgcgcaattcagaaaaatgtcgattcgatggcatggaatttatagaatgaatcaaaaaaaagattgaagaccttcatcttcaatccttcatgataattagcgtttgtattgtttcaagaaacgagtcattttttcttgaatttgagccaattcatccacacgtgggaggtaaacgatccggaagtgatctgggtccttccaattaaagccacggccatgaaccaagagaattttttcttgcttcaagaactctaaaacaaattgctcgtcatcatctacgtggtacatgtcccgatcaatcttagggaagatatagagaccagctttgggcttaacagctgagaggcctggaatatcattgatagctttgtaaataaagttgcgttgttcgtagattcgaccacctggaagcaagagttcatccacggattgatagcctccaagagaggtttgcacaacttgttgagccaagacatttgaacaaagacgcatattggacaacatgttcaaaccttcgatatagcccttcacatgatgtttcggtccggatagaaccatccaaccaacacggaaaccggcaatccggtgagattttgacaagccattcatactcacacagaagagatcaggcgctaaacttgcgatagccgtatgtttttcaccatccatgaccaaacgatcgtaaatttcatccgcaaagatgatcaagttattttgacgagcgatctctacaatctcaagcaggatctcatctggatagagggcacctgttgggttattcgggttgatgacaacgatagccttggtgtttgaagtaattttcgacttgatatcctcgatatctggataccagtttgcttcttcgtcacaaagatagtgaaccgcgttcccaccagctaggctgactgccgccgtccaaagaggataatccggcatcggtaccaatacttcatccccattgtccaaaagcccttgcatagacatgacgatcagctcactcaccccatttccaaggtaaatatcattgatatcgacatttggaattttcttcaattgacaatactgcatgatggccttacgggctgaaaagatcccttttgaatccgaataaccttcactatcacgcgcattcatgatcaaatcatggatgacttcatctggagctgtaaagccaaattcagcaggatttcctgtattcaaacgaagaatcttttctccatttgctcgcatgcgcatcgcttcttccaagactggaccacgaatatcgtaagcgacatgttcgagtttgcttgatttattatattccttcattttctgcctcgattcacgaaattatctctattataccactagttcaaatagagtacaaaccgaggactttaaaaatcctgcaaaaatatactagaaaaagcgagactttacctttacattctagcctaaaagggataaaatataagtgtataaggaatagagttaccttctattctatccatgttttcaagctataaggaggtaggattatgtctcaaaaatatgaaaacatcatggtcgctgtcgacggttcccatgaagcagaattagcctttgaaaaaggggttaatgtatctcttcgcaacggctctaaattgactattgtccacgttatcgatacccgtgcccttcaaagcgtctcaacttttgatgctgaggtctatgaagaattgcaagacgaagccaatgaattgctcaagggctacaaggaacgtgctgaaaaagtcggggttcaaaatgttgtgactgttgtagaaatgggaaatccaaaggtcctcttagctaatgatatcccaagtaaagaaggggttgacctcattatggtcggggctaccggacttaatgccttcgaacggttaatggtcggatcctcctcagaatatatccttcgccacgccaaagtagacttactagtggtacgtgataaggataaaaccatgtaagaaagaaaaagtcatattgaaaactttccttaggtgagtacggacgtcagcgaccttcttcgaagttccatgactaagttttgagccccttcgctctttaatttctgggctcagggtaaaacagtttcccaaactgttttactctcaaaactcccgagtgctagaaacaatagtgtttctagcacttttctcacggcggaaagtttttcaatattttttataaattttaaaaataagaacatatttcgacttctttgtggaacactttacttatcttagtaaaaaatagtttgtctacattctaaaaaaggtttggaacctttgttccaaaccttttttagttgtctttttttgcttctttttgttttgcatgtttttcgtaggccttgagctggcgatcgagttcttttttgatggctgattctggggcgtatttttcttcccaatcatctggcttcagaattttgtgggttactggatcaaagtgcgcctttccatctgggaaaatcttgcccatattggcccggtgaacaatctcaaagacctcttcaggatcgacccccattagtacaaagctaccataagtcaaatagagagtatcaatcaaggcatcaacctgccctaccatggagatctcagctggatgcttgctccgaaccttatctgcagccttatccaaggcttggtgaagagctgctaccgagcggtcaaattcttcctcacttgtgctagctgctcggacaaattctaccaactcctcttgcttgaacatggttcgataaagggcgtcttgaggttgccaaacaactggtttctcctgggtttccccatccatcacaccatggaaggttttgaccttattgaagtgatcatccttagaaagaaagagttctttctctgagagaataccaaagtgttgcagggccttttggatgccatccttgccattactagtcgtggtatgcttagcaattgccttgacactggtcgtcccatttcccatcgcaatagacaagccaacacctgacagcatctctaagtcattatccgaatctccaaaagccatcacttcatcgatgtcaaagccaaattcctgaccaacgatgcggatcccttctaacttggaaatccctgggttgaggacgtctgctgcaaaaggactagaccgtgtgaatttcagatctggaaactctttttcaatttttgcagtctcttctggactcgataagatcaacacttggtagattggttcttgcgctagtgcatagagggtgtcctggtcttgtgggacgaccttgctaaccactttgttaaatccacgactgactgtacgggccattttgcggggcacaaagcgactggaccaggttgaaataggactcatcccaaaactcataatccgagaaccaaataccccatccttggtaccgagagcaatttccttgcggtgttctcgagcatagtcaattagttggtgcagactctttttatcaattgggctggtatacagtacgcggtccttggtcaaaatatactgaccattataggtcactgcaaaatcaaagccatagcgttccataaacggtttgacaaaggccggtcccctccctgtcgcaagacctacatagatcccttcttcctttaaagactgaatggctttttctgttgattttaggaccgctcgactatcattcaccaaggttccatcgatatcaaaaaagactgcttttatttccatgtctactgtttctttctttttatgataaaataaattatatcacatattccaaggagcttcacatgtttaagaaaattttagcactacataccggagggaccatctcgatggctgcagatgactctggagcagtgattaccaatgaagtcaatcccatgacccaaattgcatcaccaattgaagggatcgaggttgtttcggaggatattttcaatctaccaagccctcaaatgacaccacgtcatatgttagccttgtatcaaaaaatcaaagaggaagcccacaactacgatggcatcgttattacccatgggacagatacgctggaagaaacggcttatttcttggataccatggagttaccagagatcgctgtggtcattacaggagctatgcgaagctctaacgaacttggaagcgatggcgtctataattttctgacagcccttcgagtggctgccgatccaaaagcacgtgataaaggcgtcttagtcgtcatgaacgatgaaattcatgcggctaagtacgtcaccaaaacccacaccaccaatgttagtaccttccagactccaacccacggcccactgggtttggtcatgaaaaaagagatcctcttctttaaaacagccgagccaagggtacgctttaatctcgataccatcgatggtttcgttccaatcattgctacttatgcagggatgaaaaccgatctgctggatatgttggacctttcaaagctcgacggcctcattatccaagcctttggagctggaaacatccctaaagaaactgccctcaaactccaagagtttatggatgccggtcttccaatcgctttagtatcccgctgcttcaacgggatcgcagaacccgtctatgcctacgaaggagggggcgtccaactccatcaatcaggtgtctttttcatcaaagaattaaatgctcccaaagcgcgcatcaaactcctcatcgccctcaatgccggcctaaaaggacaagaactcaaagactatatcgaagggtaaactaagatacaaagcccgtaaaatgccaagtgaaaataggaaattgtcgccgagagcgaagctcacaagagaatttatctttttcacacagcatttagggcgtgttcaattcgtgtaacggcaagcactatggtgccttgccgacacgactcactaactcctcaggtggatggtatcgatccaccttcgtcctgtcgcatttcatcaagatacaaagcccgtaaaatgccctcttaaaaggagtagagtggaaaccaaggaattccactctactccttttttatcctctagtctaaatgttctttcttttctaagtaaagcgagagcaaatgccaatctgggtgttcgcgccaatttggtgtagctacgatctggctagcaactttccttgcttcttccagaatgggataatcttctaccaaatctgccacttgaaactctgggatccccgattgacgggttccaaagatttcccctgaacctcgcattttcaaatcttcttctgccagcacaaagccattggtcgtctctgtcatgattttcatgcgctgcttgccactatctgtcttagggttggctactagaatagcataggattgcttgttcccccgaccaacccggcctcgtagctggtgaagctggctaagaccaaaccgatctgcatccataatgaccataacggttgcattgggtacgttgactcctacttcaataacggtcgtagacaccaaaacatcgacttggtgctctttaaaggcctgcatgatggcatctttttcttcacttttcatcttcccgtgaagaagagaaacgcgtgctcgctgtccaaagaaggtctctagctcttcttggagggcgagggcgtttttcaaatctagcgcctctgactcctcaattaatggagaaataaagtaggcttgagaacctttgccaagttctttgactaaccagtcgaggaccacttctaactgctcatgcttgacccaacgtgtgatgatttcctttcgtccagcaggcatctggtcaatgatggacacatccatatctccaaaggctgtaatagccaaggtccggggaataggggtagccgtcatcatcaggacgtctggattttgtcctttttctcgaaggatacggcgctgggaaaccccaaaacggtgctgttcatcaataatgaccaagcctagatcttggtagtgaactccctcttgaatcaaggcatgtgtccccacaatcagttgagcagttcctgaggcgatctcttctaagacttctcgtttctcagccgcctttaatcctcctgttagaagggcaattggcaaatctggaaaaagattttgcaagctttccttgtgttgctctgccaaaatctccgttggaaccatcaaggcagcttgcttaccagcgcttaaggctgcatacatggcaagaccggccacgactgtcttcccgcttcccacatccccttgtaagaggcggttcatatgataaggagaggccatatctgtcaagatttcattcaagctgttttcttgagcttgcgttagctcaaaaggaagctgtttttttcgttctgctaatttttctggatcccaggccaaggaaatcccttggctggcatcgtgattttcttcttttagcacttggagttgcagctggaaaaagaggagctcttcaaattttacccggcgaagggcttgcttgtactctgccggatccttagggaaatgcatagcttgcactgcttgggaacgagacatgagttgataacgctctcgtaagatgtggggtacattctcttctaaaagctggtccaagccctgatcgaatgctattttgatcaatttcaccaggctgttttggctcactccttgtgtcactcgatagactggctgcaaatcatcttccacttgagctaggagcttcatccctgtcaaactccccttggccttgtcccattttccaaaaatcgccactgtctgctggacctcgattttgtctgctagatagggttggttgaaaaaattaaccgcaatgacttggtctccctgtttgatcgaaaaacgtaagcgatttcgtttgtagccataatattggacgttggctggtgttgctaccaccccagagatgacggctttttccccatcttccaactctaaaacattgcgcgttttgaagtcttcatagcgaaaagggaaatacaagagcagatcttctaaggtttcaatccctaactttttaaatttttccgccgattttggaccgactccaggcagtacggataagggttggtgtagattcatttctcctcctttcttttataaaaaagcaggtccatccgggaaaatcccacctgcttcttcttattcttcacctttatagtcacgaggaatccgatcactcaagagacagaccacttcataattaatggtaccacggtaatctgcaacctctgttgccgtgatttctttctcgccctcacgtccaatcagggtaaccttggcccccagaggcagttcttcaggaaggcgaaccgttatctggtccatcgaaacgcgaccaacaatgggacaatagtcccccttaatcagcacatggaaattttgcatctctcgtatccaaccatccgcatagccgataggaatcgtcccgatccattgggattctcccgtcgtataggttgctccgtagccaatatcttgaccagcttccaactgtttcacatgaactaattcgctcaccaaactcaaggctggcttaatttcataaggcaagactaacacagaaccactcggattcaagccatacatgacatctcccaagcgcacagccgtgaaaatcgtatccgcatgccacaaagaggtagccgaattactagcatggacaatgggaggaagggtttcaagagcagccaatacttctttgaaaaactggtattgcgcttggaattttcgatcatctgcttcatctgctgtcgcaaaatgagtaaaaatcccttcaatttcagctccagctgctaagaggagacgttcagcctctttgatctcttcgatccttcggaatccaatccgccccattcctgaatccaccttgatatggaccttcaatcctgaaagatctgcttcttgtccaagcaattgatccaaccaagcaagactcgccactgttaagcggatgtcatgctctttggctagattcactgtttcacttggcacaactcctaaaatcaaaatagggtgttgcaagccttcttcacggatttcgagggcttcatccatattggatacacaaaagccatcaacctgaggcgccaattttttggttactgcaacgaccccatgaccataggcattggccttgacgactgcatatttcaaggcttgactcggaatatggtcactgacttgttgcacattaaaggcaatggcatccaaatcgactctagcaacagttggtctatgtttacttgctttcattttcttcctccaaaatgacactggtcgacactaggtctcccttatgactgatcgaaatccataccttcccagaaaaaggagacttagaaaaatagggagctccgtgggcatcatttaaaatttctaactcttgaaaaccaaccggtccaatccctgttcccattgccttcgaaaaagcttctttggcggaccatcggcccgttaaatattccattttccgttttccagacaattcctcaaagcgctctcgctcagcctcagttaagactttttcagcgaatcgagtattcttctgataggctttttcaatcgcagcgatcgattcgatatcgatgccatgtcctttgatcatcttgttttatccttatttatcgtttcagtatcgttttactgacaaaagagaaggggctaaagaatcactccttccgcccctgccttttacttattcatcgttgcaatttctttgaccaaggcctgtgttttttcccaacccaggcaagggtctgtgatggattgaccataaaccactggttcattttgacgaccatcttctagataggattcaatcatgaaaccacgaactaaaattgccaaatccttgttccaagcacggttcatcatggtttctctcacgatgcgtacttgctcttcgaattgtttaccagaattgtcatggttggtatccaccaggatgaaaggatgttgcaagcccatttcgctatagcgttttgctgccgctagcaaatcttcataatggtagtttggaatattcttaccacttgcatccaatcctccacgaaggatcgcatgagctaaaggatttcctgatgtttccactgcttgggcattgaacaaaaagttttggggatgttgggctgcataaatcgcattgaacatgactgaaagatttccagaggttggattcttcatgcctgtcggagcagagatcccactagatacaaagcgatgctcctggtcttcaactgatcgcgctccaatggcatgataagaaatcaaatcttcaacatacggaagacttgctggataaagcaactcatccgcagttgtcaaaccagtttctgtaatcacacggtagtggagatgtcggactgctttcaaaccgtccacaaagcttggtgctgcatgtgtatctggttggtgcatcaagcctttatagccatctccattggtccgaggtttagccgtatagacccgcatcacaatgaaaatctgatctttgacttgctcttgcaagtctgccaaacgacgggcatagtccatcacagcttcttcattatcagaagagcaaggcccgatcacaagaaggatccgttggtcttctcctttgataatagcttccaattctcgatcacgcgcttctttgcgctccaaggctggaccttccaagcggtaaagcgaagcgatctcttgctcatcaatcttattgctcttcgtaatgaataccatacggcctccttatgctacctagccccatcctctttctatttcagaggagctcttaaaatttacgtccgtgacagtttttgaatttcttgcctgaaccacaagggcacaaatcgttgcgttttacttgtgataagtcaatatctgctggaatatcttgttgttgcgctgcaatgttgcgagtcgcagttgttgaaatactgtgttccgtacgtggacgttcttgttcgtgaatttgggctttcatcatgagacgagtcacatcaaattcaatcgatccgatcatatcgttaaacatacggaaactttctgattggtattctaccactgggttattttgcgcatacccacggagtccaaccgcatttcgcaattgatccaaagcatcgatatggtccgtccacttgctgtccaccacacgaaggatcaagactttttggaattcttgcacagactcttcgtcacgcaatttagctacttggctagcatagatttcttctgcacgtgcatacaagtaatcgataacttccttgtcagattttccttcaatatcgcttgcagaaatcgtatcttccggaaccaaattgtatttggcaaagttcagaatcgcttcaacgcgttcttccttgcttgagtggctggctccttcaacaatccgtttgatggtccgtttgatcatggccttgatttcaggcgccaagtcacggttagctgtgatgacatcatagcgttcagcgtagataatttcccgttgttcccgcatcacgtcatcgtattgaaggacttgtttacgggtatcgtagttgtttccttcaacccgtttttgtgcaccctctacctgacgggtgaacatatttgaacggatcactgattcttcttcgctcaacttgaagcgatcaagcactgctttgatccgttcagaaccgaaacgacgcatcaattcatcttcaagagacaagtagaattgagattcacctggatccccttgacgtcctgaacgtccacgaagctggttatcgatccgacggctttcgtgacgttctgtcccgatgacacaaagtccaccgagttcgcgaacaccttcaccaagtttgatatcggtaccacgtccggccatgttggtcgcaatggtaacagcaccacgttgaccagcgttcatgatgatttgcgcttctttgtagtggtttttcgcattcaaaacttcgtgagggacacctgcttgaaccaacaattgagaaaggtaatcactggtttcaacggcaacggtacctactaggactggttgacctttttcatgacgagacttgacatcttccacaacagctttgaattttgatttcaagcttgggtagagaaggtctggatgatcaatacgggcaatcggacggttggttggaattggaatcacgcgaatgttataaatttcacggaattcttcttcttcggttttccctgtccctgtcatccctgacaacttcttgtacatacggaagaggttttggtaagtaatcgacgcagatgttttggtttcttcttgaactggaacaccttctttggcttcaatcgcttggtgaagtccatcagaatagcgacgtccttccatggtccgaccagtaaattggtcgacgatcaagatttcttgatcttcgctgaccacatagtcgatatccaaaatcatgatgtagtttgcacgaagggcgttgtcgataaagtgagtcaaagctacgttttcaatatcgtacaagttttcaagattaaagtagctttctgctttatcgattcctgaatcagacaaaccgatggttttagatgggacatcgataatgtaatcgtcctctgtcaaagtcttcacataagcatccgccatgtggtagagctggctcgtatcagaagctgtctgacctgaaacgatcaatggagtacgcgcttcgtcaatcaagatggagtctacctcatcgaccaaggcatagttcaatggacgttgaaccatgttttctgcacgcacaaccatgttgtcacgcaagtagtcaaaaccaatctctgagttggttgagtaagtgatatcacagaggtaagcttcttttttctcagctggagattttgctgcaaggttgatccctactgaaaggccaagccatgagtaaagttctcccatctctgttgcatcccgctctgtcaagtattcattgacggtaacaacgtgcacccctttgccagacaaggcattcaagtacaccggcatggtggctgtcagggtttttccttcccctgtacgcatctctggaacgtcaccatggtgaaggacgattccccccatgacctgaaccttgtatgggaacaaaccaagaacccgttttgcagcttcacgaacaactgcaaaagcctcgtacaagagatcatccaaagactcaccatcttggtaacgttgcttaaactcaactgttttcgcttttaattcgtcatccgtcaaagctgccatttggtcttcataagaaaagaccttatcagccattttttcaaggcgtttgatttcgcctcgatcattttcaataattgtttttaataaatttgccatttttttccttactttgaatttttcaaaatctaaaatgttctttttattctagcattttttaaacattttttcaagatcaaggctgtatcttacaagactttcgagtggtttttttcgtgtaagaaaatccaaaaagatgcctgctcaagcagacatcttttctttaggcgatcgttattcagacaaatggtaagaatagcttgccacaaccacttcttcatgccaacgaagtgcatacttcaatttcaaactcatttggttgtggagaatattttgccaatgttttttagggataaattgagggactaggactgtaacggtgttgcctttttccttggcctcctcagccacttttgagacaaattcaactgttggctggataatatcccggtaactggtcatgacattttcaaagcgaatatgagggaaatagtgcttaaattcttctgccacctctgcatctttaaccttggtttcttctgttgagacgtgcatggctatgacgtcgtttcctaggctattggcgtaactcatagctcccacacttacctgagtgacattcccaacaaggacaatcacggtattgcccgcataacttgtcttttcgatcttacctcccaagcgcaattgagccgcaactttatcatagtgattacggatactcaagaacatccaaagcaagagaccaataatagggaagaagggccagatctcacgcaaacggaataataagaggatcaagacaattccataacagatggctgcccccaggatattggcaagcgaatacttaagaaatcctttttgatattggcgtttccagtggatcaccatccctgtttgagaaagggcaaaaggaataaagaccccaatggtataaagcggaatcaagctttctgtttgtccatcaaaaatcaagagcaagacgatggcaccaatcgccaaggtcaaaatcccattagaatagcccagacgatcccctttttccatatacatgtgtggcatgtatttatttttagccatgttaaaggccaacattggaaaggctgagaacccggtattagccgcaactgccaggatcaaggctgttgacaattgaaagacgtaaaagaaggcttgtccgactggggaattccctaagatggcttgggccatttgggctagagttgttatccctttagctggaacgacacccacccagtaattgaggaaggtaatccctgcaaacatgatccccaaaatcaaagccataatggtcaaggtagaggctgcattctttgcttttggtttcttaaagaaaggaaccgaattggagatggcttcaacccctgttagggaagcggatccactcgtaaaggcccgcaacaagagaatgacactaacccctgaaatggtttgccccacatgagcagttgcattataggccaagtgacccgtcaagatttggatcacaccatagccgatcaaggcaatggtactgacaatgaaaaggtaaaccggaatcatcaatgatgtggccgattcgcgcagtccccgaaggttcatcagcatcaagatcaagaccaacaaaatggaaatgtgaagattataaggatgaagagatggaatcgctgacgtgatggcatctgcaccggaagacacagatactgctaccgtcagcatgtagtcgaccaagagactaccaccagcaatcaaacccgctttgggagacaagttctccgtagtcaccatgtaggcccctcccccttgagggtaggcatgaatgacctggcgataagaaattgttaaactggctaggagaaccaggaccacaatcccaattggaatggaccaccaaatggctcccgctgaaacggtcatcaagaccaggataacttgctctggaccgtaggcgatagaagaaagcgcgtcactagagagcatggccaaggcctgcattttccctagcaatccaccttcaccttctgcaccagatttcaacggacggccaataaaccattttttcaatgttgaaaacataaaaaactccttgagaaaagatcatgaggccgggaattccctgcctcttttcataaaacaggggttattctactcttttttttcaagactgtcaactaaaattgtgaaattttcataaagctttcattgtgttcattcaacctctcttagatcagccagcttcttttcaaattgatccaagcaaaaaacgagcctgggacaaaaatcctagcctctcaattatttttggattgtcgatcaatacgcagtggttgagtgggctctactacgctgatttcatcagtttttacagccctactcaactgtgcggaggtgggacgacgaaatcgaattctaacgaattaccgatttctgtcccactctcacttttttattttgcttgattttcgacataaaaggcaataacatccgaagtgtactgggctgtgccagctccgaacttgtcgatattttccttgaattctgaattacagacatagcctttgccgatatggccaaaaacctctatagagcagtcaaatccatacgttcgaatcgcgtctaaaagtttggcggcttgatcttggttttcatttgctgatacgggtagtccatctttgagattttgagacaaagtttgaaaaacttggttgaaggcttccgtagcctcatcttcacgccccttttgccgctcgagagcctggtccatgacttcttgaccatatttctctactgcttcttggtggtatttttgattgtcttggtagctaaatccagtgaatttttcctcaatcgtcatgtttctttctcctttttgttcttgaatggttttttgcaaggtggcaatcaaggtatccagatgttgcctttctcgagttagatagtccaactgcctggtcaaatggggcaataagttatatttctcttcggctaagagttctgctatttggtctaaggaaaatcctagatacttgtagtagagaatcacctgtaatcgttctaaatcttcttgactgtatgtccgataaccattttcagatttcacagggacgagaagtcctatcttgtcatagtggtgcaaggtcttgacagagacacctgacagctctgcagcttctttgatatggtacatgatttcctccttatactcaatgaaaatcaaagagcaaactaagaagctagccgcaggttgctcaaagcactgctttgaggttgtagatagaactgacgaagtcagtaacatatatacggtaaggcgatgctgacgtggtttgaatttgattttcgaagagtattacatggatagtataatccctccccttaggtcagagtcaaggctaaacataaaaattgttttcagataaaaaaaggcttgagttgtttcacaacttttaactcaaaccccttcttttttatggatgacttacgattaattctaaaccttgcccttccaaagtccaagattcaacatcgctcggtaagataaagtggcttcctttttgaataggataatccgttccatctaccgtcaatttcccttctccgactaagacgctcaataagctgtaatcagcggtcttttcaaaatcagcttttccagtcagttcccacttatagacggtgaagaaatcacttgcaaccaaggtggtcatacgaagatcatcgatcacaactgtatctggatggctatttgctggctcaccgatgtttaacacatcaatcgatttttccaagtgaagttcccgcaagtttccttgagcatccttgcggtcaaaatcataaacacggtaggtagtgtcactcgactgttgggtttcaagaatcaagattccagaaccaatagcgtgcatggtcccacttggcacatagaagaaatctccagccttgacaggaacttttgtcagcaaggcatcccagttcttgtcctcaatttgctgacggagctcttcttttgacttggcattgtgtccatagataatctcggacccttcatcggccgcaatcacgtaccaacactcagtttttccaagttctccttcatgctccattgcataggtatcatctgggtgcacctgtacactgagccaatcgttggcatctaaaatctttgttaataaaggaaagacaggctctttacgattaccgaataattcccggtgttcttgataaagctgatccaatcccattccttcgtatggaccattggctactttagaaactccatgtggatgggctgaaatcgcccaaaattcaccgacatggtcgctcggaatttcgtaaccaaattcttctttcagacgagttcctccccaaattttttcctgcatgactgaatgtaaaaataatggttgtcccataatatcctcctcgcatttcatgtttctattatacaaaaaaaagaaagtttttgaaagccctttccatctttttcctctctcgccagaaactttatttttgtgtataatgaaagggatgacactaaaagaaaacattattcaactggcgcattctattgggatttcaaaaattggatttacaactgctgatgacttcgcttatttggaaaaatcgctccgcttggccgttgaggaaggacggaattctggattcgagcataaaaatattgaagagcgcatccaacccaaattaagtctctcctccgccaagaccatcatctcaatcgctgtcgcctacccccacaaactcaagcaaaaacctcaaaaaacggcttataaaagaggaaaattcacgcccaacagctggggattagactaccattatgtccttcaagacaagctcaaccgcttagctgctgggattgaagaaatgacgcaagattttgaatacaagggcatggtcgatactggagcactggttgatacggccgtcgcccaacgagcagggattggctttatcggaaaaaatggcttggtcatttcaaaagaatacggttcttacatgtttctgggggaattgattaccaacctcgaaatcgaaccagatcaaccagtcgactatggttgtggagactgtcgacgttgtttagatgcttgcccaacctcctgtttaatcggagatggctctatgaatgccaaacgctgtttgtccttccaaactcaggacaagggcatgatggacctagaatttcgcaagaaaattaaaacggtcatctatggatgtgacatctgtcagattagctgcccttataacaaagggctagataatcccctggcaacagagatcgatcctgatctggctcatccagagttgatcccctttattgaactgtctaacggacaatttaaggaaaaattcgggcatgttgctggaagctggcgaggcaagaatatcctccaacgcaatgccattatcgcactagccaataccaatgaccgctcagccattcctaagctcctgaacatcatcgaaacttcacaaaatcagatccatattgcaacggctatctggtctttagggcaactgctccgtgaagtcacaccggaccttgttgagctcttacggaatatcaaacatccgaccgatgccatcatagaagaacgaactgctttctttgaaaaattcggcattcaagcagattcacagctacaataaaaaaacactaaggttgtaaccttagtgtttttttagttccttcaagaaataccaactccccatctctacttggttaaagctaatctcacttgaatagacttccttgtagccatttttggtgtaaaaatagacatttcctttggtattggtataaaaggctagtttttttcctttaatcccttccaagaaaggctcaattccttctgtcataaagcgactgccatagccctgccgttggtgtttaggggcgactgcgagaagcatcaaataccaatcaaagtctacattttgctccaattccttatccgtgtcctccataaatttgaagtaggccaacatatttttcaaggaaataaacttgagcaaaccgaatcccccatttaagagataggcccgaaaaggaatcggtcctttttgcaacaaggcaactgcatatatttcatcgttcttttctgccacaaggcacatatggtgctttagaaaaacctttaccaggatgcgcatcattgcctcaacaaaggcaggatattgcttgggatcccgaaccaaatccttgataacttttaaaaatagatagtcctcaaaggctgtactggctactcgaaccacctgatccagatctgctttttctgcttttctgtacttcatcttctctcctattctaagtccactttccagtatacactatccctcgctcttagacaaaggtcaattttcagcaatttgttcattcaagccagcaaaaagagtcctccccagacgagtcccaatccccaagcgacgaggacatccttgggataatgaacccctccaagaactcggacaagggctaatagaagagataggagcatggagcacattccaagcggaagcgacaactggcagacacacatggagataatggtggccgaaaaaacatgtcggctaggaaaggaatgtccggatgaattcttttctaataagggttgaatctcccatttctcataaggtctcggaacattgacccaatgacgaaagaggctaaacaagacaaaacccgaagcagggatccagataaaaggccagatttctcccattgaagttttcttaaaaaacagccaacaaaagaccaggccgtagatgcctggcatggcgaacgtcaagattcgattcgtcctttgaaggacccgcacacgatgtggttttctcgcaaaaggcagggttagccaacgataaaatttcggataatcttgaagattgggcttcatgttggcactcctgtctttcatcttattttatactactagtatacgcgatcctaagaaaacctgtcaagccaggcttcttttttatcctttctttcttctttttcacatgatttagcactaaaatctgatgatttatcatttttctgtctccaagaaacgtcttttccattactattatcgataaaaaaatgaggctgggacaaaagtcctagcctcttaattgtttttggattgtcgagcaagacgcagtggttgagtgggctctactacgctgatttcatcagcttttacagccctactcaactgtgcggaggtgggacgacgaaatcgaattctaacgaattaccgatttctgtcccactctctttttttcactttgtatgttacgccctttgtatcttgttggaattgcgacaggacgaaggtggatcgatattatccacctgaggagttagtgagtcgtgtcggcaaggcaccattgtgctttccattacacgaattgaacacgccctaaatgctgtgtgaaaaagataaattctcttgtgagcatggctcactgcaagaatttcctattttcactttgcattttacgggctttgtatcttgttgttacgctacttcttctgtgaattggctattgtagagatcagcatagaagccattttgggtcatgagttcttggtgattaccctgctcgataatatttccatctttcatcacgagaatcagatccgcattacgaatagtggacaagcgatgggcaatgacaaaggaggtccggccttccatgagtttgtccatagctttttgaatcaactcttctgtacgggtatcgacagatgaggttgcttcatccaagataagaagcggagcatccttcaagagggcacgcgcaatggtcaagagttgcttttgacccacggacaaggtcactgaatcatctaatacagtatcatagccattcggcaaggtccgaataaagtgatggaccccaaccgctcgggttgctgcttccaccgcttcgtctgaaatatccgtttgattgaagaccaggttttctcgaatggtcccctcaaatagccaggtatcttgcaagaccatcgaaaaggcatcatgaacttcttctcggctcatggccttagtatccacaccatcgatggtaattttaccagcttgaatgtcgtaaaaacgcatcaagagattgaccatggtcgtcttacctgcacctgtcggaccaacaatggccaccttctgtcctggcttagcttcagctgtaaagtcatggataatagtcttatctggtgtataaccaaagcgaacatgttcaaaggtaacatgaccttttggcacttccaattggcgtgttttttgggattcatcttccatttcttcttcgtctaagaattcaaagacacgccccatagcagcactagctgattgcaattgggtaatgccttgagccatttgactaattggttgggtaaagatgcggacataggtcataaaggcaacaatggtcccgatggtaatgtctccattaatggtgaggacagccccaacgatacagaccatgacatagccgaaattccctacaaactgcatcaagggcatcatgatcccagagaagaattgggatttccacatgctatggtacaaatcttggttgatggcatcaaaatgatttttggcttggtgacggccattgtaggaaatgacgatattgtggccactatagatttcttcaacataacctgaaactttggcaaggttgtcctgttgttgcttaaagagaggctggctcttgaccataatgatgctggaaagagcaaaacctgcaaagacggacacaatcgctgtcaccgccaagtgccagtccgtcttaaacatcataaggatggagccaatcaataagacaatagaagagaccatttgaaccaagctttggttaaaggattgggtcatcaaatccacgtcattggtcacacgagacaaggtatctccttgttcatggctatcaaaatattggaggggcacgcgattgatcttctcagcaatggcattgcgcaagcgttctgcaaagcgctgaatcatggttgagataatgaaactactgctgtaggacaccagtgctccaactccataaaggatggctaaggtcagggcaatcgaagtgatcttatcaatatcaatggcgcctcccatcccttttgtaatggtatctgtaatttcttttaacttatccggtccaataaccgtgattacactcgatacgatcgaaaagaggatagcaattaggaaaaataggtggaagcccttcaaatagggagaaagttggctccaaagggatgttttttgttttgtcttatgcatgttccaactcctccttagataattgtgaataggcaatttcttgatagacttcattggtcgcaagcaattccttgtgggtaccttgaccgacgaccttcccttgatccaagaccaaaatcaaatctgcatccataatagtcgaaatccgttgggcaacgatcaatttggtcgtatctgcaagctcttctttcaaggcttgtcgcaggatccgatctgttttataatctagagctgagaaggaatcatcaaagatgaggatctcaggtttgcgagccagggcccgtgcaatggccaagcgttgccgttgaccgccagagaagttgcttcctccttgcgctacttctgtatccaagcctttttcttttgcggccacaaactctttggcttgggccaattcaagagctttccagatggcttcatcctctaattttccttgactactttctccaaattccatattggagcgaatagtgccgctaaagagcactgctttttggggaatatagccgactttattattcagttcttggtggctataattcttgacattgatgccatccactaagatctttccttctgttgcatcgtaaaagcgcggaatcaagttgaccaaagtggatttcccagaaccggttgatccgatgaaggcaacggtttgtcctttctgagctgagaaggtcacatgttcaatcacagcacgggaagtccgtccatatcggaaggaaacatcttgaaattcaacggtaccctcttggcctgttgtttcttttgactcacttgggaaggctacagacggctctaaagctaagacctggttgattcgtttggcagataccaaggcacgaggaagaataatcaagatggccaccatcatcataaagccaacgacaacctgcatggcgtaagaggagaaggtgatcatatcggagaagaccttggtccgatccgctaatgcaggactggtgaagatctttgtaggatcttttggcatggcgatatcattgatcaagtgcgccccaatccagtagatagcaagggtcaacccacttgataccactgtcatgacagggttcatcaaagacatcaaacgataaacaaagagatttagacgggttaagcccttgttttcagcctggaatttctcattttgataagcttctgcattgtaggcgcgaaccactcgcaccccagtcaaactctcccgtgtcgtcgcattcaaagcatcggtcaaaccttgaaccttttgctggcgcggaaaggcaataagaaccagaacagagagaagaatcaagaccatcaagaccgcaatcccaacagacgttgtccaggcactgctcttcccccaaatcttggtcagagcccaaatcgccataatgggaccacgcgtcacaacttgcatccccatgacaatcatgatttgtaactgggtcaaatcattggttgtacgagtcaagagagagggaacggagaatttcttgatctcggcatcagagtaatccatcacttgatggaaaatctctcctcgaagtcgcgtcgtaaagctggcagcgactcttgaagccaaaaagcccacaaaaactgccatcaaaaagcttccaaaagagaagagcaacatcttgcttcccggatccataatatcagaaaccttggtcccatccttggctaagagggtcgtgatatcggataagtattcaggagtctttaaatccatccaaacagccagacagataaagaccgtactaagggcaatcatgccccattctttggcagttaaccgccgaaatatattgatcattcctcgctcctttttttcatattctcataaaattgatgcatgaccctgaaaaagatggccaattcttcttctgatacaccagccatcatatcctggtccacttcttcaaagaattgtttcatgtcattcaatttatcttttacactgtctgttaggtagacatacttggcccgtttatcggttggactaggctctagataaataaagccatttttctccatgcgcttgatcaggttactcgtcacggattttgagatatgaagttcctgctcaacatcccgaatcaaggtcactttcccctccttttcacgatgagataaaaagcccaatacctgaccttggggtcctgcgctaaattcaagccctctcttcttggcctctctttctaccatgaggtgaatgagatgaccgatttttttaaattctagtaaaggtttgtccatcatttcctccaaatagttctcttaagaactttaaagttactatgagaactattttaacacaaaaaagatccctgtcaagaaaaaagtttccataagaactaaaaaaaggagccgaatcgactccatccttcatctttagataataatgccttctagatgatccatttcatgctgacagatctgggccggaaagcctgacaaatgaattgtttttgctttccaattcatatctcgataggccactgaaatctcctcataacgagtggtcggccgactccccaccaaggacaagcatccttcctctgtttggtaaggctttttcttttcaaggagaaccggattaaacaggaccaaattttcacttcccattcggatgataatcgctcgctttttcaccccgatcatattggctgctaaaccgacacactcaaggagatgagcatttaaggtgtcctgcaaatccaaagccaaggtgcgatcctcaggtgtcgcttcttctgacttttgacccaagaataagacatcttttacaatattctttttcattccttcctcacttcttgatagatagacgaaagaagagagtgggacagaaatcggtaattcgttagaattggatttcatcgtcccacctccgcacagttgagtagggctgtaaaagctgatgaaatcggcgtagtagagcccactcaaccactgcgtcttgctcgacaatccaaaaataattgagaggctaggacttttgtcccagcctcctcgctctggtttctaacctctaagagacaattgctgcttattttttaagcttttcgctcacttcttttgcaaggacaaagttccccaaggtcgctgaaccattgccggcaactgcaggtgtcacaatataatctctcacatcaggtacagggaggtaaccgttcaagagggcagtaaatttcgtgcgaacacgatctaacatatgttgttgagccatgactcctcctccaaagacaatgacgtctgggcggaaggtaactgtcgcattcactgctgcttgtgcgatgtagtaggcttgaatatcccatacattgctgttgagttcaatgttttccccacgaatacccgtacgagcttcgagactaggaccagccgcaaagccttccaaacagccattgtggaaaggacaaacacccttgaattctttttccacatccattgggtgttgagccacatagtagtgtcccatttctgggtgtccagctcccccgataaactcaccacgttggatgacaccagctccgattcctgttccgattgtatagtaaaccaagttttcgatatgaccacccgcattgttgcgtgcgaccacttctccataggcagaactattcacatctgttgtgaaatagataggtacattcaaggcacgacggaaggccccaacgatatctacattggcccaatttggttttggagtcgttgtgatgaaaccataagtgtttgaatttggatcgatatcaattggtccaaatgaaccaatcgcaagcccaactagatcctcaaattttgagaaaaattcaatacacttatcaatcgtctcaattggcttggttgttggaaattgtactttttccacaacattatagttttcatcaccaaccgcacaaacaaattttgtaccgccagcttccaaacttccatataattttgtcatgttggctccttttttattatgaaaaatatcctgtatttattatagcatattttgtagtcaatctttttctcttctctaaagaaaaaacacacctttttttgagaaataaaattcaaggactggagatgatagaccagtccttgagaacttattatttcgattaagctttgacttcgatgatcgcatcacccttcgcaacagatccagttgcaacaggtgtgacagaagcaaagtcagccgtgttagtgacgatcaccatagttgtgtcttcaagaccagctgcggcaattttcgctgcatcaaatgtaccaaggacatcaccagctttgactttatcgccttgagctactttttgatcaaatccttcaccgttcattgatactgtatcaataccaacgtggatcaagatttcagcaccattagctgtcttcaaaccgtaagcatgaccagttgcgaaagcaatagttacttcagcatctgctggtgcatagacaacgccttcagttggtttgatggcaattccttgtcccatcgctccacttgagaagacaggatcattcacatcagcaagtgctacagcactaccaacgataggagagatgatggtttcgtcttgaagagatgctggaataactccagttgtttcttcttcaataattgcaccagcttctttgtcctctgcaggaactgatgaagcttcatcttcataaccaaacatataagtcaaaccgaaacttagtgcagttgtaaatacaaccataaatacatatttcaataattgaccatttagatagagaagtgtacctggaataattgtaataccaaatcctgtaccagccagatttaacatagatgcaatccaaccacctacagcacctgctcccaaagcaataacgaatggtttcacataacgcaagttcaccccgaagattgcaggctcagtaatacctagcaaagcagaaatagttgctgggaatgctaaagctttcactttttgagatttagattttactgccactgctaaagtagcaccagcttgcgcagtcatagctgctgtaatgattgcattaaatggatcttttttatctgcagtaattaattgtgattcaagaagattaaagatatgatggacgccggtaacgacaatcaactgatgaacgccaccaataagaagacctgcaagaccaaatggtaaattcaaaataaacttagttacatttagtacatattcttcgatactgtggaagaatggaccaataataaacaaagcgaggaatgacatgattgtcaatgtgaataatggaaccaataacaaatctaagacatctggaattttcttatggagccacttttcaagtttcgcaccaattagaccaacgaagaaagcgggaagaactgagttctggaatccaaccacatgatggaagataccaaagtatgttgctgctttagaaggatcttccgctacaacccacgcatttggaagtgtcggactaaccatcatcaaaccaattacaatcccaagaacaggatttcctccgaatactcggaacgcagaccatgaaatcaaggctgggaagaaggcaaacgcggtatcagttaaaattgttgaatatgtataaaaatcagtagatttaaatgcgtctgctgttgtaccaaacaaagccaaaacctggtcttgagcaatggcaccacgaatccccataaacaatccagtcgcaacaattgctggtagaattggaacaaaaacgtctccaaaggtacggatcgcgcgttggaaccagtttccttgtttagcggcttctgctttcatttcatcttttgatgatgttggtaagccaagagctactacttcatcatagatcttgtttacagtaccagtaccaaagatgatttggtattgacctgagttaaagaaagcaccttgtactttttcaatgttctcaacaacatctttgttgatttttgattcatcttttaccatcacgcgaagacgagtcgcacagtgagcaacactgctaacgttctcaaccccaccgattgcatcgatgacctgctttgcaatttctgtatttgacattttgcaaaaatctccttattttttgtaatgtaaacggttaaatcgtttctacgtttttaattgtaccacgtattgaaaatatgtcaagcgttttgcaggatttttttgaaacttttttggactttttgacaccttttgacagtatgaaactattttcattttaaaacaggcctgtactacgctttttagcactttaaatcagacttttattttcattttctttcatattttcataaattttcaacttctcctcttttcttcaggctgcaaaatagctgtcaatcgtttgacattttttgccatttttttcatttatcgcttgcatttttaataggaaatcggtactatggaagtaagaaaaaattcggaggaataaaatggaatggacaactgaacgtcgttacagacgttacgaagactggacaaaagaggaaaagcaagccatccaagatcatatggccaaatctccttggcatacacactatcatgttgagccaaaagctggtctcttaaatgatcctaacggtttttcctactttgatggaaaatggatcttgttttaccaaaatttcccatttggtgcagcccatgggttaaaatcatgggtacaaacagaaagtgaagacttggttcatttcaaagaaactggtgtaacgcttcttccagacacagatctggatagccatggagcttattccggatcagccatgcagtttggtgacaaactattcttattctacaccggaaatgttcgtgatgcagaatgggttcgtcatccttaccaagtaggtgctttgatggataaagacggcaagattgaaaaaattgacaaaatcttgattaatcaaccggctgactctacggatcactttcgtgacccacagatttttaatttcaaaggtcaattctacgctatcgttggtggtcaaaaccttgagaagaaaggattcatccgtctctataaggctgtagataacgactattccaactgggttacagtcggtgacttggattttgcaaacgatcggacagcttatatgatggaatgtcccaacctagtctttgtaggagaccaacccgttctcctatactgccctcaaggcttagataaagccgttcttgattatgacaatatctatccaaatatgtacaagattggggcaagctttgacccagaaaaggccaaaatggttgatgtatctgaattgcataatctcgactatggttttgaagcctatgcgactcaaggatttaatgctcccgatggacgtgcctatactgttagctggctaggtcttccagacgtttcttatccaacggattcctatgactaccaaggagctctctcactggtcaaagaattaaccatcaaagatggcaagctctaccaatacccagttgaagccatcaaagacttgcgcgctgagagtgaggaatttgccaacaaggcacaaaccaagaactgctatgaattggaattgcagtttgaaaaggatagccagaacgaaatcgtcctctttgccgatgcagaaggaaagggcttagttctcacatttgatctggctaaaggattggtcacagtcgatcgtagccaggctggtgagcaatatgcccaagatttcggtacgagccgtagctgcacaatcgctaaccaagcgacaaccgctaatatttttattgacaattcgatatttgaaatctttatcaataaaggagaaaaagtattttctggtcgggtctacccacatgcagatcaaaatggaatcttgatcaagtctggaacccctactggaacttactacgaacttgattatggtcgcaaagctaactgatgtcgccaaactcgccggtgtcagccctactactgtctcacgggtcatcaataaaaaaggatacctgtctgaaaaaacgatccaaaaagtccaagaagccatgcgagaattgggctataaacctaacaatgttgctcgtagcctccaaggaaaatcagccaagttagtcggcttgatctttcccaacatcagcaatgttttctatgctgaattaatcgacaaactagagcaccaactcttcaaacacggctataaaaccatcatctgcaatagtgaacacgactccgaaaaagagcgcgaatatattgagatgttggaggctaaccaggtagatggcatcatttcaggaagtcataatttgggcattgaagattacaaccgggtaactgctcctatcattgcttttgaccgcaacctctccccagaaattccggttgtctcttcagacaactacgctggcggggtgcttgcagcagaaactttagtaaaaaccggagcccgaaatattatcatgatcacagggaatgacaactccaactccccaacaggcttgcgtcatgcggggtttgcatcggttctacctgagtccatgatcattaatgtttccagtgatttctcccctattcgcaaagaaatggaaatcaaacagattttaacccaccacaaaccagatgccattttcgcctccgatgatttgacggcgatcttgatcatgaaagtcgctagagaattagatattcagattccccaggatttgaaagtgattggttatgatggaacccagttcattgagacctatacacctgaactgacaaccatccaacaacccctcgaagacattgctatcctcatggtggatcttttactccaaaagatcgaaggaaaaaaagtagcgactaccggttatttcttgcccgttagtctccactctggaaaaagtgtctaaaacaacccctacagttctatactgtaggggttattattcgtcaaaaaaaggctgggcaaaaattgtctagccttttatatttattttatatttaatagaaataactgtatgacgcagtggttgattggcatctttgttcgccttttaagctccaaagatgacctaatcaactgtgcgggggtggaaaaacgaactcttttaactagttggagttctttcccactccctttttacttattcttctgtcacaaattgactgaggacaccattgacaaatcgtgaagaggtttcatccgaaaaggccttggccaattccaccgcttcattgactgcgacgatctgtggtgtatcaaactctgtcatttcataaattcccaaacgaaggatgtttttctctaccaaggtcaagcgctcaacagtccagccggttttcaaatgttgaccgatttgttggtctagttgatcttttgactgatagacacccgtcacgagattcatgagaaaggcaggaagatcgacttctttgtcttctgctaggtccttgtcatgtagataagcaaagcgacaagcttcaacaatgtctccatcgtattccaaggccatcaaggcttggaaggcgcgctcacgcaaatctcgacgtgattctaataaaatttcatcagtcattgaggaagtcctcattaaacaagtctttcaagtccggttttggagatttttccgttgcgataccgacaacgtgaatgttgacagcatccaaggttacatctgccatatcataaactgcagacttgaccgctttttgaatcgctaccgcgacagatggtacagcaactccgtattctaaatagagatagatgtctactgaaacttgaccatcttcctcggtatgaaggtatacgccacgtccaagcgaacgttttgataagctatctgaaacacttttattttcaagtgaatagacaccctctacttttgctgtcgcaatcgcaataattttttctaatacacgtggtgcaataacgatgtcaccaaattgttcagttgccatagaagttcctttctatttgacaccctgagatgtctcttatgcacgagaaacgtaagttccttcagtagtgttaatgaccaatttttgtccagcttcgatgaagtcaggaacgtttacgaccaaaccagtttccattgtagcaggtttaccagaaccagtcactgtagcacctttgatagatggttgagtttctgcaacagtcaattcaacagttgtaggaactgttacaccgatcacttcgcttccgtagaattgaatttttacttctgagttttcaaggatgtaaagcaattcttgttctacgttcacaactggaatttcatattggtcatatgtttcagtgttcatgaagtaggctgtatcatccattttgtacaagtattgagctggaacagtttcgataatcgcttgttcaaatttttcttctggacggtagcttgtatcaaatgttgaaccagtacggacatcacgcaatttcatacgcatgatagtgtttcctttacctggtttgtggtggctagcttccaaaacgcggatcaattttccgtcagctgtttcaaaagtcataccagctttcaatttacttgcttcgatcatgttttattacctcttttttaaaaatagattactctttattgtaacacactatttgatttttctcaaacagcaatcttctctttttgagaagaaaggattgctatggaccgcccctgatccatccagatccaaattcccctttgcttctttcgtgttttgttattgtagttcctataccaaaatggatagggctccaaataagatgtctgggagaagaattactctacaattcatttcatagtcttctcttcacatctctgtctaaacagaagttaagaaaaacgtatattttataggacaatcaattctttaggagcaagggtcaagacttcacagcctgtttctgtgatcaagaggtcatcttcgatccgcacaccagagagaccttcgatataaatacctggctcatctgttaaaaccatccctgcttgaatcgcttctttagacgtttggctgaagtatggctcttcgtggatatctagcccaattccatgaccgattccatgagtaaagtattggccatagccggctgcttcgatcacatcacgtgggattttatcaaaatcacggaagccaagtccatctttagccgcatcaatcaaggcttgattggctttcaaaacggtttcgtaaatttctctttccttgtcgctgacatgtcctgcatagatagtccgtgtcatatcgctgacatagtgatcatacaagcaaccaaaatcaagggtcaaggcatctcctgctgaaatcacccgatcacttggagtcgcatgaggcatagcagagcgttcaccagctgctgagataatatcaaaagatacaccagaagctcctaactcccgcattctaaaatctaggaaagtcgctgcttccaactctgtcgttttccctaccttgatataatccaaaatatcatggaaggcttggtcagagatgctacaagcttttttaatggccacaatctcagtctcatccttaatcaagcgcaattccatcacaaagttcgctagggattgaaggctaatgccattgaaaacagaagccatgcgggcatggtaggctactgtcacttcgtcctcaaaaccaagttctctgattccaaggtctttaacgatctctgcagctgcagtcaactcatcgcgggtttccacaatctctacaaaggggaaacaagtcgcatgggcatggatggtgtagcgcgaatccgtaaagaggaccacgcgttcttctgtcaccaaagcagtcccgtttgaaccccagaaattggtcaaataataaacatttttcaaattgttaatcaaaaccgctttgaggttttgggctttcattttgtttcttaagttgctgatccgttgattcattgtaattttcctttcaaatattgtcctgtgtagctggcaggatttgctgctacttcttctggtgttccggtcgcaataatggttccgccaccgacaccgccttctggtcctaaatcgatgatatggtctgctgtcttaatgacatccaaattgtgctcaatcacaaggaccgtattgccatcatccacaaatcgctctaagactttgatcaagcgagaaatatcttcggtatggagtccggtcgttggttcatccaaaatatagaaggattttcctgtagagcgcttgtgcaattcagaagccaacttcatccgctgcgcttccccacctgaaagagtggtcgctggttgacccagcgttacatagcccaagcccacatcttggatggtcttaagtttgcgttcaatttttggaatgtgcttgaagaattcaactgccttgttgaccgtcatatccagcacttctgcgatatttttttccttgtagtggacttctaatgtctcactattgtaacgacgtccatggcagacttcacaaggaacaaagacatccggcaagaagtgcatttcaatcttgatgatcccatctcctgagcaggcttcacaacgcccacccttgacattgaaactaaagcggccttttttatagccccgaattttggcttcattggtctgagcaaagagatcgcgaatatcatcaaagacacctgtataggtcgctggattggaacgaggagtccgaccaatagggctttgatcaatgtcgatcaagcgatcgatatgctcaatcccctgaatggtcttgtatttccctggtttttccgaattgcggttgagcttttgagcgatggcttttttcaagatgccattgatcaaggtcgattttccagaaccggaaactccagtgactgcgatgaattttcctagaggaaagcgcgctgtgatgtcttgtaagttattctcacttgctccagtaatttcaatagaacgaccatttcctgaacggcgctctgttggaaccgggatcttgcgcttgccggacaagtactgtccagtgatggatttactgttgcgcgctacctgctttggagttcctgctgcaacgatctctcccccaaaaacaccggcacctgggccgacatcgatcaggtagtctgcctctctcatggtatcttcatcatgttcgacgacgatcaaggtgttgcctaaatcgcgcatcttcttgagactggcaatcaggcggtcattgtccctttgatggaggccgatagacggctcatccaagatgtaaaggacaccagagaggttggaaccgatctgggttgccaaacgaatgcgctggctttctccacctgacaaggtcccagccgatcgcgacagggtcaagtaattgagccccacattgtttaagaaggtcaagcgatctttgatctcttttaggatcggtcttgcaatcgtagcttcattgtccgttaagaccagctggtccacggcttttaagtggtccgcaatcgatagatctgacacttccccgatatgcatccccttttctcctccgacacgaacagagagagcttggtcattgagacggtagccatggcaggtcgcacaggtcaattcgttcatataagagcgcatttggttgcgggtgaaatcactattggtctcacggaaacgacggtgaatgttgtttacgaccccttcaaaaggaatttcgatatcccgaactccaccaaactcattttcatagtggaagtggaattccttcccgtttgaaccatagaggaccaagtccttttcttcttgagaaagatcggaaaaaggtcggtccatatcaacgccaaaatggatcatagcctgctccaacatctgtggatagtagttggaagagatcggattccaaggagcgagtgctccttcgcgaagggttaagcgatcatctggcaccaccaaatccaagtccacctctagcttaatgcccagcccatcacagtctggacaagatccgaaaggcgcattgaaagaaaagaggcggggctctaattcaggaacggtaaagccacagactggacaagcataatgctcagaaaagagtagctccttgccatccatggtatcaatcaccacataaccatccgcaatccgaagggctgcttcaatcgaatcaaagagccgcgagcgaatgccctctttgatcacgattcggtccaccaccacttcaatcgtgtgctgcttgcttttagatagttctggaacctctgtcacatcatagatctcaccatcgaccctcacccggacatagccgtctttttgcaccttttcaatgatattcttgtgctggccttttttcttgcggataatgggagctagaatttgcaggcgctggcgctctggtaattctaagacttgatcgacaatttgctcaaccgaagaagctgtaatcgctccatgcccattgatacaataaggcgtccctacacgtgcatagagcaagcgcaagtagtcattgatctctgttgccgtccctactgtagaacgggggtttttactggtcgttttttggtcgatggaaatagctggactcaagccgtcaatggagtccacatctggtttttccatatttcctaagaactgccgggcataggctgataagctctccacatagcggcgctgaccttctgcatagagggtatcaaaggccagactggactttccagaaccagacaaacccgtcaccactaccaatttgtcccgtggaatttccacgtctatattttttaaattatgggcgcgtgccccatgaatgacaattttatcttgcatgttcttactctaatcacctttttgttaacctccattataacaaattttttagtattcttttatccaaaaccgtcctttttctgatataatgttaaggtgtaaaaaaacaaggggaggcaccatgaaacaggtctttttatcgacaacgactgaatttaaggaaatagagacgctggaacccggtagctggatcaaccttgttaacccttctcaaagtgaatcgatggaaatcgcctctgcttttaatatcgatattgcagacttacgggcaccactcgatacggaagaaatgtcccgtatgaccatcgaagatgagtataccttgatcatcgtcgacgttcccatcaaggaagagcggaacaatcagacctactacgtgacgattccgctagggattatcctgacagaagaggctattatcacgacttgcttagagaaattgccgcttctcgatatctttatcaaccgacgcttgcggaatttctatacctttatgcggtcgcgctttatctttcagatcctctatcgcaacgctgaactctacttgtctgcgcttcgtaccttggatcgcaaaagcgaacagattgaaagccaattgcacaaatcaacgcgtaatgaagagttgattgagttgatggagttggaaaaaaccatcgtctactttaaggcctctctgaaaaccaatgagcgcgtgatcaagaaattgacaagtgctactagtaacatcaagaaatacctagaagacgaggatctgttggaagataccttgatcgaaacccagcaggccatcgagatggcagatatttatggaaatatcctgcactccatgaccgataccttcgcatcgatcatctccaacaaccagaacaacatcatgaagaccctggccctcgtcaccattgtcatgtccattccgaccatgatcttttcggcctacgggatgaacttcaaggacaatgagcttccgctcaatggcgaaccccatgccttctggctgattattttcatcgcctttgccctgactgggtctcttgtcgtctacctcatccataaaaaatggttctaacacctactaataacactaaggagtatttatgtctcaatttgatttgaatcaactaagcaagaaaaaccaagaatttatccggatcgccaaacaccaattgcttgaaaacggaaagacagaggaagaagcagaaagcctcatccaagaaattcttccagctatccatgaaaaccaaggaaaaggaattccggcacggaccctttttggagctccaactgtatgggcgaactctttcagcgagaaagaacgctatgaaaaagagcatccgaaattaaacgatgctccctctctcatgattttggattccttcctctttatctttggagtctttgctgcgattagcgcctttatgaacttggtcgcaccgcgtcgtactggctatggtttgatcaccttgatccttggaagtttgacaggggctttgctcttgtaccttatgtactacttcttctatcagtatatggatggtaccaaagatcgtagcgaacgtccttctctttggaaatccatgccgattcttgttggagtcatgttcctttgggtcattgtcttgtcctttacttctttactcccacaggttctcaacccaactattccagatgtccttgccatcgttttaggagctttagcacttgtccttcgcttctacctcaagaaacgctttaatattaaaagctcgagcacagcacctgcaactcgacgctaaaaagaaacggatgaagttttcatccgtttttgttttactgtattcccctgttcaatctttttgaaaaatagaggactaagtcatcattgttttcacaagaactataagggtccaagggctgatccctaaaccaaactccagatccgtctgggatatagccccgtttgacatacaatctctgagcaggtccataacctgagtgtaaaccaacccctaaagtaacaatctctgatagtagccggactctcttttccgcctcttctaaaagttgattcccaattcctcgatttctaaacggctcaaaaacattaaaatcagatagttcaggatagactcccacgaaagggccgtgcttggcaacaggcaatatagtgatataacctgccacaaatccatccgactcagctactaatacgtccctctctctattctcctgttcctgaaaatagctagtcaagatatcctctctacctggccacccttggtggataaaggctttagagatgtgctcaatatctgcctttatcatcctcctgatgattacaccttccttcatgttgcgctccttgatacctttctcttcatcattatagcataattagagcttgagaaaggtcaaagagcttcacacggacctaactcactatcacatttctatgctcgcaaaaaagatccaaaagggtctgaaaaagaggtcccctggacctgaaaaaaagacccgttagggtcttaattcgctctcttgtcttcaagctcatgaaaaaaagaccctaacgggtcttactcgctttcttgttttcaagctcgtgaaaaagaggtccactggacctcttttttaatcttcgtttacgaaaggcatcaaagccattacgcgagcgcgtttgatagctgttgttactttacgttggttcttcgctgaagttccagttacacgacgaggaaggattttcccacgttctgaaacgaaacggctaagaagctcagtatctttgtaatcgacatattcgattttgtttgctgcgatgtaatcaacttttttacggcgtttgaatccgccacgacgttgttgagccatgtttaattctcctttatagttttaattcgttaaacccattcttagaatggaagatcgtcgtctgagatatccattggattagctccaaatggattttcttcacgaccaaagtttggcgctgcattgcttggttcagatccaccaaagcttggggttgcatttccagcaaaaccaccgttgcctgatgaatagccaccacctgcatgcccttcgcgtgctgcacggctttccaatagttggaagctgtctgctacgacttcagtgacataaacacgttgaccttgctggttttcgtaattacgtgtttgaatgcgaccggtaatcccaatcaaagcacctttcttagcccagttggctaagttttctgcttgctgacgccagatcacacagttgatgaaatcggcttcgcgctctccattttgactcttgaagttgcggttgacagctaggctgaaagtagcaactgcttgattgcttggagtgtagcgaagttcagcatcacgggtcatacgaccgacaagtacaacattgttaatcataagtcacctcggatgatttcttacgcgtcaacttttacgatcatgtgacgaagaatgtcaccgttgatttttgaaagacggtcgaactcgttaagagctacagcgtcattcgcttcaacgtttacgatgtggtaaagtccttcacggaaatcttggatttcgtatgcaagacgacgtttttcccaatcttttgattcaacaacagttgcaccgttgtcagtcaagatagaatcgaaacgtgctaccaaagcgtttttagcttcttcttcaatgtttggacgaataatataaagaatttcgtatttagccattgataatgttcctccttttggactaatgaccccctgtctttgcaaggggtaagtgaggtttactcacaagaaactattataccagacttttcgaacaaaggcaagaattatctttaggatttaaaaaatgattttggacgttcccttctaaaggaaagaaatgccctaaaaaatgacattttatagtagaaactactcccactcttcctctcctttccttaaagaaaactgatatcagttagctttaagcttgagtctttatactagctacaacaaatctcaagaaacgaggaacgattatgaattatcttatcatccccgcctatcaaccggatctgaatcttgtcaaactggttcgcttggtccacgctaagagcgatctccacatcatcgtggtcgacgatgggagtgacgctgacaagaaagtgatttttgacaaattggacggtcttgcgacagttctgacccacgagcacaaccaaggaaaagggcaagctctcaagactgcttatgcctacatcctagaaagaggcacctatggaagcattgttacagctgatgcagacggtcagcacaaaatttgggatattttcagggttgttaagcaatctcaagagcatcctggaacacttattctaggagcacgcgccttctctggaaaagttcctttgcgttctgctttagggaataaattgacccgcttcttgtttaagcaacaaacaggagtggcagtcagcgatacccaaacaggcttacgagcttttactacgaatctcttgcctttcatgcttgaagttgaaggacagcgctatgaatatgaaatgaatgtgctcctcgcagcaagcaagtccttccccatcgtggaagttcccatcgagacggtctacatcaatgacaacgaaggctcccatttccgacctattcgagatggcctcatgatctacaaggacatgttcaagtttgccctctcctctctgagtagttttatcgttgactatctggtctacgccttcttccttttcgtgatgatggccgtgcccattagtctgcgtattctcctagccaatgggatcgctcgtgtgacgagttccatctttaactactcgaccaataagcacctggtctttaagaacaaagacagcgtcgctaaaaccggaagtggctactttggtctagctcttggcctctttattctcgatacgctcttgattcgactcttctatactgctttcgggctcaatctcctgatcagtaagattgtcgtcggcttcctcctctttctggtctcatgggtgatccagaaaaaagtgatcttcaaagaaaggactgctccccaccatgaaattctttaaaaaatcatatacctatgctgcctgctttggccttcttttgaccagcagttttagctactcgatgctcaagacctttgtcttatccgatgccatccaaaccgtaaaagctacgactacggacaccaaggcagccaaaaaagcagctgcatcggctacaacaactgatactagctattcagatgacaatatccaggtgactttaacagaaaaaacggttgaaaatacccaggtttacatcgcagatatcacagtcagctcatctgactacctcaaaacagcctttgcacaaaacacttacggaaccaacgtgacagccaagacctctgtcacagctgccaacaacagtgccattctggcagtgaatggtgactattacggggctaacagtacaggatacgtcatccgaaatggagtggtctaccgcgataccgttagggaagattcaagcaatggtgacctagccatttacaaggatggatccttcaaaattatctatgaagatgagatctctgcggatcaattggtcaaagacggggtcgtcaatctcctcgctttcggtccttccttagttgaaaatggggaaataactgtcgataccaactcagaggtcgggcaatctatggcgtcaaatccacggacagcgattgggatcatcgatgaaaaccactacattatcgtcgtgtcagacggacggacttcagaaagtgaaggcctgtctctctaccaattagcagaagtgatgaagtcttatggcgttaaaacagcctacaacctagacgggggtggatcttctacactttacttcaatggccaagttattaataaaccaacaacaaatggtactatctcagaaagggcggtgagtgacattgtctacatcggttactaatcctattaaacaacggttgaaaaaaacgattctctggtattctctaatttcagctttcttcttcgttggaagtcgcatctatgaacactttagttttggcgaaacctctgccttcatgcactacctcttcttgattcctttaatcggtggcgccctactagtgcttctacagttgatggtgaaaggcttctctcgcctgagtctcaatctttggaattcaggagtggctacgctcacagccggagccctctaccgagggattgtcaacctctctggtcgatctaccacaatggatcagccctattattaccttggagttgcctttctagcactggctctgatcagcctcttctttgtccgcagtgtctgggtggagaaggcatccgcttagtcagaaaacaatcttaaaaagaaatcagatttccagaaaggctccagcttttatacgagatagctattttgccaaggatgctatagagttttcattctttttaaggatgatttcctataaaatacgaaaaaaacgagcagttctatgtatagaaccgctcgtttttgagtaacatttttgcaacttattcctgtcgcatttacttgacccgtttaaactttgcaaatttggatataagagctgcctgttcgtccgtaagatcaacattatccccttgaaaagttaatacatctccctcaattttgtatctcactttttcgtcattttctttagaggatatcaacttctgcttttgatctacttttaaatctactgatttttctgtcttgttaccaagtatactaacaaaaccagatatttttcctttctcaccctttatttcaagggtgagtttaattttaagttgatcaatgaatagttctgctccttctatggaatttccttgttctttaaggatactttttatatcttctgtgctaggttcaaatacataacccccattatcactgcgtgtaaaactggagcaagctacgagaattacagcaacaaaagctaataatgtggcaaatacaatacgcttcatatgtttcatagagaatctccttttctaatcaagacaattttatcacaaaaataaaccgttttcaacgcactgcttatccttctttagaaaggctaaagactttcttgttactaccagcatgttcttgttgttttccttttagttccatctgtgatgagttatctgatatcatttttatcgtttccagctatgaaatagaaaacgagcagttccaactatagaattgctcgttttccgacatgtcaacaattttatttatgtttacaaatcttcacgttttttgctagctacaaagcctgctaaagctagtgaggtcataccaaagaggctaaggacggttgaagccaattcttcttgacctgtttttggaagaccagttgctggtgtagctgttgcttctgcttgtccacccgtatgataagtgacagcgactggtttgtttgttgccacttcttttgtttcgcttgcaactggttgagctggagttactggagttcctggactttcggatactactagttggtctggggtcactggggtttctgattgacgacttggcacttcatctatcactagtgtcggattttctggttgaatccatggttcaacaatcgctccactatgcacctctggatttggcttgataacgtctttgatcaaagaaagaagatggtagttgatccgattgctcacttcataaaggaaatcattttccgcaacacgatagcctgccgggagatccacatggacacgataggagccattcatcagcatcgtctcaaagcgcagaagatcatagatgctttgtgggagaagtcggctgataccgtcattccctaccacttttacaaccgttcctgcagggaccggctgatcaaatccaatggtcaatttgttttcatctaagtaatggaaagcaaaggttacttttggatgtggattttcaggtgaaacgatcacctttttcaccagctctgttccccaatcataatggtaatcagatagggtgatcttggctgtataagtaccaaaaggcaagtctgggaaggtaccaccattgtaggaagcattgaactctccttccactacacgtccttggtcgtccaccacttggtaacgaacgacggatggataataagaaatgacttcgccactgctatctgtgaagacgacttctaaggtccccttttcagccgtcggtttttcagactctgtctcacttggttgttcatctgaaccggcttcattcgtcggagtcgtctcctctactttctttccttcaatgtccatctcagtggtattgtagaccttatcccagatggtatagcgaacagtagaagggtccaccccttctggaagaagatagctaccgtcctcttggggttccaaggccactgtttccccgtccttgacataggacagataagtccctgctaagccactaccggtttcaagtaccttacctgggcggaaaatccgtgttgctggatcgtactgagcacttccagactcgatacttggagccgtattgtcaatcttaaccttgaagttaagctcttgttgcttggcacctgaagcagttggacggtaggtgatcacaaattggtattccccatctggtaattgcttgccgtctttgtccaagccttcccaagagatttcataaaactcttcactgcgattcccaatccggtaactccagtccgtcttacggtggacttcatttccaacctcgtaaatcgggttggtacgagttgtgtcatccttcttgtagactgataggtgtacattttcaacattgcgaagcatgacggcttttaccttgatactatcaaagctggaatcattatttggagagaagtagagttgatccccgtcaaagcgatccccatcctgaccaagagttttggctacggattctccattttcatagacataactaatcaaagaggtaaagtgattgtctggatgacgctctggagtttctgggacttttccatctggataatcggtcttatccttgtagtagtaaaacggcttgtcgctacctgtatattcgtagataggcttttcaatgccacgaagattttggtaatccccatggaaaccaacatatgggaggctgaccagatgtttttgactgctggcatctttaaccagtacaaaaccttctaagaaataaccatttggcatttgcttgctgagctcttccttgtacttgcttgtatcaactgctacgtggatggtccgctgaccattggctgggatagtcaccgtttccttaccgtctaaagtttctaatagacgaggatggagggtgaatttgccatcttgaacttgatctgtctgaagagtggtttcatatcggacagacttatcttgattggaaagattgtggatggtcacatcaaattcaaaggtatctgtgacattgccaagtgtcaggctacttttagcatcttttgctgtcacatagaggtctcctagagctgctgctgtgacgtccatgacccccgctccttgctgacgaacagaggaataggcatgcgtttcctcatctacatgagggatcgctgtactcatagtcatttgtttgactagaacctgtagttgttctgggctaagatgagggaagcgctccttcaaggcttgtttcaccagtgcagtggctcccgcagcatgaggagaggccatgctggttcccctatccatatagtactctccattattaacagatgagtagatcattcctcctggaagggtgacatccggtttgagatccccatcagctgatagcccccaagatgagaagtcagatagttgattggctgcatcgtaaggcacacgtttgaatttattggcaatatggagctggtaatcattggcatgctgagccaaaacaagtccagcagcgtggccaataaccccaactgggaatcgttctccgagcccttctaaatcaaagcctacaggattatttccctgttcctctgtttggtaaaagatcacacctgtagcaccagctcttttgagctctttgaccttgtccacatccgaaacttcgccgcctcgctcagtaagaactaagtgcccattgatactatctgcttggtagtggtcgatccctcccttgtccacatggagatagctttgagggatggttgtccgaaaagcgtcgcgttctacaaaggaatgcatcggaatcttgccatctgggaagtccacggaaccttttaacgcatctatggtcaggcttgcttctgtcgactcatgcttggtgagactattaatagacgcgactgagatgacatttggattgacggatggcgtccctgtcattccataatctggtgtggtggccagtggtttgctgtgccagaagccattagtcgccatattggtagaggcaactgtaatggttactcccgcctttcttgctgtatcaaaggcctggcgggtgatctctccaacatcatatacagaacctgatgctgttcccaaactcatattgatggaatccgcccctaatttgaccgcatcttctaccgccttagtgtagatgaaattttgaacttgaccgcccttggtatctgagaaaacacgtagaaacatcagttgggcttctggagcaacaccacggataatttcaccatttggagagggttgagaggcgtttcccacagcagttcctgctacgtgagccccgtgtgaaattggatcttcttctttgacattgtcatccatatcactgtagttatgaatgtagacaattttattgttgtaccatttaccgtaagtgatccccgcttttttcttagcctcttcaatttccgcctcactcttgtacttggccttactgatatctgttagacggaaaacatcatgggcagggtccacaccggaatcaatgatcgcaactacctgcccttgacccttgattcccttatcccagaggggttgtaaattgatcagactattttcttcactgaccttggtcgtagttgaagtcggtgatgcaggtacgggctgtgtttccgccactctggtccgaccaagtggagcataatctacagcatccacacgcgctagtcctcgaatctttttagcatctccataagtcgtctctagagccaagccgttaaaaagcagattaaagtcatacaattttttgaattgaatggattgcttttcgagctctttcaaaaactgctcatgatcctgattggttttttcaatgcgagtttcttttgaagtcggagatacctctccaatcccatcagaaaccttttctttcaagcgaaccaggatctcaactgggcttgtttcttctaaattttcctttactggttcaataggggtcgtaattggagcagcaaccccattttcgtttggtgcttccgcaactgaaggtgaagccttctctgcctttacttgatttgtagtcgaactgcttgtatcgattgaagatgaaggtagagactgatttgtcttttccttactctcaatctcagctgtagcaaggttcttagaagcaacatcttctataactgaagcgggcgtactgtccttagtagccgaaagtggttctgctgttttctcatctgttactgcggtttctggcaccactacagaaggctctacgacagagggtgttggtacgatcgtatcagctgaaacggctgaacccattagaaaggtaccaatcaaaacagaagcgactccaattgcgtatttacgaatggaaaaacgctgttgtcgatgaaattccataaaaactcctttttacacactaggttaaggtagcttcacactaccttaacccttattttatccttgcaactaaactaatagaagattatccttgatccggacgattcttcttcaagcggatagcaccgaacgtgagaagaagaaccaacaaacctaccatccctgtttgttcatttccttgtccagtttttggaagagaaggtgatgattgacttgcatcctctttagttgactgtcctatttctgatccaataaccttttggaacattggacggatatctgtctgtttcgcgactattggatgtgtctcgtttccatctggctgttttcctatttcaccttcttgcgtcgtcgttgacggttgaggagatggaatagaagaagatggaacaatcggatcttctacctgatcatctgaaacttcgacaaaactagttaagtagcgattaatgcgctcacctactgtatagaagaaatcattctctactgcgcgataaccttttggcaaatcaatatggatctgataatctccattaactagaatcttttcaaaggtctttggttcgtaaagggtttgatccaactccactttttgccccgtccttttatcgatggcaaagacacgggttccgtttggaagctctttatcaaagacaagatcaaagcgatttttatcaatataatgatagacaaatttgaccacaccttctggatgctctttgctcaattccaccgttaccgttgttggagatacccaagagtagttttggtcttgaccgacgacttttacagtgtaggttccaaatggaagagttggtaatggatcttcataataaatattaaattccttatcaacccgatttcctcgactatcaaatacttggtaacgcatcatttctggatattgattggtcgcttctcctttttcattgacaatttgtacctctaagcgtcctactgtggcttcactagtttcatgtgtcggacttgcttcctctgttccagtattttctgtcgtcacctcgtctgaaacggtctttccatccagagtcatggtattggtattattgacccggtcccaaatatagaagcgtactgtttctagatccactccgtcagggataagataggttccatcttcgtttggagtgatttctacttcctgaccatctttttggtaagagaggtatttaccagctagcccactacccgtttcaacaatctcacctggcttaaagaggcgagttatcggatcaaaaagatctgtcgtttttgccagttgaggtacttgcttatcgaccttgacctttaagacaatctcttgaggtttggcaccaggtgtgcttggacgataagtgaccacatattgataatctccatctggcacaagctgattatttttatcttttccactccaacgtgtcgcatacagaatcttactacgatcgttgatccgccagccataatctgatttcttctggctctcattgcctttttcaaaaattggatgttctctcttgacgtcatccgcacgataaaccgtcaaatgaatattgtccacatttcttaagaccactgcattgagtttgacactatcataggatccatccccatttggcgagaatacgagactatttccatcatagtgcccgtctttttctcccaagacaacttgtacttttttgccccctctccaaatagagctgactaaggcagtaaagtgatcccctgggtctttttcagggtgctccgctttttcatttgcgtaataatagaatggtttttcatccccagtgaaggcatagatgggtttttcaattcctggtaaatcttgatagtttcctttaaaaccaatatatggaagactcactaggtctttcttagttttggcatctttaaagaagacaaaaccttctaaaaagtaaccgtttttcatttgattcgtgagctcacttgtatagttactggtattcacagaaatcggaaccgtcacacttcccatagcaggaacatgaatggttttttctccttcttgatccagtagttggcgcatcttcaaggtaatacgtccattttctacttgatcggtattgacgaccgtatgataagtgaattcttttgcttctgaactaagattatgtacagtgacatcaaacgtgaaggaatctttaacatttccaagggtcagactactatttgctccttttccacctgttacaaagacatcgccaaaagctgctgctgcagcatccataagaccagatccttgttgacgaaccgaggagtaactgttgctttcctgatcaaaatgaggtttggctgtactcatgactaattgtcgcaaaagcgtatggatttgctctgggctataatttggaaatcgttgttctaatgcttgcttaatcaaggctgtcgcccctgccgcatgtggtgtcgccatactcgtacctgcatccaaatcgtacgaaccatctgggatagcagagtaaacatttccacctggcaaagtaacatcaggcttcaacattccttcggcggttaatccccagcctgtaaagtagagcatcttattcgcttcactatagggtactttcttaacttcttgatggaaagtgatcgtatattccccagcatgtgtagctagctctttcccgatagaatgaccaagtacactaacaggatagaaagatccccaataccccatggaaagattttgaagggtatctccttgttcttcattttgataaacaaggaccccttttgctccagcttgtctgagggcattgaccttatcttcatctgttacatcgccaccactttcaaccagtgcaatttggccttttacagcagcatttcgataagtatcttctccccccttcggtacataaacataagactgtggtccttctactggaaagatcaagcgatagaccggaaggtcaatcagaccattctggaattcttccttattttttagagctggaacttctaaactaatttttgtttcatgtgtaatgctattattgaaagcaccaatcgctagaactcccttttcaacagctggttcatccattgttccagtatccggtgcatctgcttttggcttagcctgccagtatccactcacggcataattccctgctgcggcattaatgataacacctgattttcttgcaaactcaaaagcttgacgcgtcaacggattggtatcagcttctgccccattgacacccccaaaactcatattgatagtatccgcacccaacttcacagcatcttctacagcctttgctacaataaaaccttgttcggtcatccctttcttatctgagaagacccgcataaagatgagttgtgcctctggagctacccccttaagtagttctcctgttggcactggttttgttgcatttcctactgcagagcccgccacgtgggtcccgtgcgaacgcggatcatcctccttgatctcatcattcatatccgaatagttataagcataaatcaccttatcgttgtaccacttaccataagtaattccggccttcttcatggccgcttccatctgctctttattcttgtatttggctctactcttatccgttaaactaaagaaattatgatcatagtctaggccagtatctaggacagcaaccacacttccttgtcctttgatccccttatcccacaatggttgaagattaatcaattcattttcatcacttaccttggtagggactagggtcgtttgcttcttcggaagattatggttttctatagttgtagaaagaggggtaatctcaacgttttcaactcgagctatcttgcgaatctccaaggcatccttgtaattcgtctccaagacaaatccattaaagaccaaatcaaaatcagctaattttttatattgaattcccttttcatctagctcttttaaaactgccgttttgattgggagattattccgaatttggtctgcaatacttggagaagttgctacatcctgttttttcgtctccagacgtaccaaggcctgaacacgtgcttgatctgttacagtttccgaaacaccttctttattggctactgaagagtgttctgccactgttttctccagttgctctttcttttcgactccctccttttcagatttaggattagaagcggaatctacattcccatttgaatctgctgtttcaggagatttctcaggtgttggttgctcttgcaaaaaagtttccttacttgattcttcagttggaagagcttcctccgaatttttttccaaaccagataacggttgaacctcttctttcccttcttgcgctacaattgcaggtggttctatcgtcccctcctgttcctgcgctaaaacagccggaccaaaaaaaaggcacccgactaccactgatactaaaccaacggcatatttacggaaagaaaatcgttgttgtctgtcatttctcataaccagacctccttgtttgttgtaagcgtttactatgccttcattttagtccttcttttatgtaaagtcaatgcggtctgtcaaaatctaaaataagtataatatttagtttatttctgacaatttttctttatcaataatgaaaggaagcgattggttttgaagatgaaaccttttggtaaagacaccctctcaattaaaaacaaaaaggaagccctcttagagaggatgcttcctagttttgattaattttcttcacgctttttgctagctacaaatcctgctaaagctagtgaggtcatgccaaagaggctcaggactgttgaagccaaatcttcttgacctgtttttggaagacctgttgctggtgtagtagctacttctgcttgaccacccgtatgataagtgacagcgactggtttgacacttgcaacttctttcgtttcaggtgtagttggggtagctgggataactgggctttcaggttgaggggttggggtagccggagttactggagctacaggatggactggattttcaggactgactggatcgactggcgctggctgtggttctggagttggttgaggttctggagtaggtgtatcttcttccactttttccacaaaggtcttattgcccaagattgaagcagacaacttcttccctgccttatccaaatcttggatgtactggataaagacttctgtatccggattgatagccccgatcaatttggtatcgcggaagactgagaaaccatctccacccccatacaagaaatcattgataatcgctttataagtcttgttgcgatcgatttcggtaccgtctgccttgtaagctttcacgaccttataaggattttcttctgtggcatccgctggttttgtgtaggtatacttgatgccagccatttgcaagaagtagagttctttctcatcatattgttgatccaaagctttgtagatttggtccccagtgatttctactacttggaggatatttccaaatggttgcaccgcttgagccgctccccaagttacagttccgtcgggcttgacaacaagatctgcacggattcccccattatttgtaaaggcaaagtcaacatctggataacctgattttttggcaatttctagttgcgctgctgtgaccaaatctccaacagcactttctttttgtgcattcaattcacgagtaatattttcagccttgtctgctgtaccgatttttgcttctgttacctttttaaccgtcgcattggcatcatcgatgatcgcttgaaccttggcatcttttgctttgcctttagatggatctaccgcaataattttagcagttggagctttgacaaagtcagctgtatctgtatctaggactccacggacatccgagtaggctttcccttgagacgtaccttgaacgatcaaggtatttccgaccatcccgtttgtatattggtggttatgacctgcaaagacaatatccactgagttttcaggataaatttgatttaattttttgatcatgtctgcagccggtccttctgcgacaccgtttttacttgttgcagcgacgtgagctaaaacgacgatcgcatgaaccccttggtcattcaattcgcgggcatatttagcaattgattccgcttcatctaaaacacggtattgttcatgatttttacgcaagacgagatttgggaattctgtcgtaacgaccccaataaatccaaccttaaccgtcttgtcattcactgggatttctttaattgcatatggtttccaatcaaatggaattttattggtatctttgtccaccaagttggcaatgacaacttcctgtttggaagcttcatgatgataatcatcgacgatcttattgaattgaccaggtgttggggcttctcccttcatgatccggttgaattcaccaagtccttcgtcaaactcgtgattaccaagggttccgtattcaaagttcatttcattgaagacttttacagtcggttcatcttgaagcaaggcagagttagctggactagctccgaccatatctccagcttgtacacggatgctggcatttggcgttcctgcattctccgtttcaaagtctttttgtgaatcatttagataggttgccaaaagtggggctgttcctgcattcttcacagtttcaccttctaaacgagctgtcccagtttgttccaaggcgccgtggaagtcattgacccccatgaactgcactggcaattcatccgcaaaaacgctattaatcgtaaaaacactgagacccgcaacaaccgctaggatactgcttttcaagacaacttttttcttcatagaatactccattttctaatttacgctactcctctaatcaaaaggagaaagtagaagaattgatttgctgcaatcagctcttccattttactattttttcgactttacttcaatgtttctctgaaaactctttcattttttagaaaatatgtgttttccaaacatcttttttcattctttttccttttgttacttgctgttcctcacaaaagaggctgggacaaaagtcctagcctctcaattatttttggattgtcgagcaagacgcagtggttgagtgggctctactacgctgatttcatcagcttttacagccctactcaactgtgcggaggtgggacgacgaaatcgaattctaacgaattaccgatttctgtcccactctcttttcttatttattcacgttttcccatttccagttttgaacttctggaatgtcgtctccgttttcacggatgtagtcatggtggaaggcgattgtttcatccatcttcgctgcaaatgcgcttgctgcttctccaagagctgcattagctgcatcttgtgccaagtggaagcgatccaactcagacatcacacgcatatcaaatggtgtggtgatatccccgttttcacggtaaccatgtacacgaaggttatgattgtgacggttaaagaatatatcacggatcatgccttcgtaaccatggaaggcaaagataactggtttatcagttgtgaagactttgtcaaattcttcatctgaaagtccacgcgcatcaacggatgggtgacgcaatttcaagatatccacaacgttgacaaagcggatcttcaattctgggaaggctttgtgcaagattgtgatagctgcaagagcttctaagtttggctcagtacctgcagctgcaataacaagatctggctcttcatctgctgaaacagttgatgcccaatcgatcaccttgtatccttcacgaaccaattcttctgcttcagctgctgagtagaattgaggacgtgggtgtttagaagaaacgatcaagttgatcatatcttctgccttgaaagcttcatccatcaccgcaagcaagctattggtatctgctggcaagtactcgcggatatattcaggagttttttctgccaagtgagtcaagatacctggatcttggtgagtgtaaccattgtggtcttgttggaagacagttgaagttgcaatcaagttcaaggctgggtagtttttacgccatgttgtatgtgtcttagacttacgcaaccatttgaagtgttgagtaatcatagaatccacgacacgaaggaaagattcgtaagaagcaaagaatccatgacgacctgtcaagacatatccttcaagcataccttctgcttggtgctctgacaattgagagtcaatgacacgaccagcagggctcaaggcttcatcgtagtctggtttcatacgtcctaaccattgacggcttgtacgagtgaagacttcttgaagacggtttgatttggtttcgtctggaccaaagatacggaagttatctgggttcgcatctaccaagtctgccgcatacttaccaaattcgatcatgtcttgagccatgatttcacctggtgtgttgaattgaagggcatgtttcttccaatcagttgtgttcattggtttgatcacaccagcatttgtgattgggttcatagccattcgacggtcaccttttggtgcaatttcagcaatttcaggaactagtttaccagtttcgtcgaacaattcagctggacggtaagattccaaccatgaaagaagggcatcgacatgctccatgtggtgagcatctactgggattggaacttggtgcgcacggaatccaccctcgattggtgttccttcccatgcttttggaccagtccaacccttaggaatacgagcaatcaagacaggatatactggttgagttgcttcttcagcagaacctttacgagcttctgcttggactttcttgatttcttcaattgcttcatccaatttttcagcgaacaaagcgtgggcagcttcgtggtcttctgaaatcgcagtgacattcgcaaagattggtttccaaccaagaccttcaaagaagagggccaattcttcgtctgttttgcgctcgaagatcgttgggttgtggatctttccaccattgaggtagaagattggaaggatagccccatcgttgactgggttcaagaaggtatttgacaaccaaccagccatcaatggacctgtttctccttcaccgtcaccgataactgtggcagcaatcacatctggattatccaatacagcacctgcagcgtgagaaagggcataaccaagttctccaccttcgtggatagatcctggtgtttcaggcgccgcgtgagaagcgattcctcctgggaatgagaagatcttacataagtgtttgaaaccttcttcattttgtgggatgtttggatttaattcagtataagaaccatctaagtatgagttagataccattacttgtccaccgtgacctggtccttcaatgtagaacatatccaagtcgtatttgttgatggtacggtttaagtgagcatagataaagttttgccctggtacagttccccagtgtccgattgggtgagctttcaagtcattttcaacgacttcgcgcttcaacaatgggttatctttcaagtacatttgagcagctgaaatgtagttggctgcacgccaccaagcgtctactttatccaagtaagctttgctgttataatcgacagtcatcttgtctcctcacaatttctagacaggtctgttgaacaacctgttcgtttgattaatagtttaaacaatctgttttcacgtcaaacagatgatattgaagaaaatgttcaatattacctctattctatcaagaatttccctttttgtacatcagaaagtaagaaaaatattctttgaacatcaaattttaattttctactaaagcggtaccattccctagaatgatacaattgaaaaaagacttcgctgatttttacaaaccagcaaagtcccaaatgaaatggagtcggttaaatgactttttgacctttcttgtagacatctgtcactagatttgtcgcaaagaaatagaaaagataatctagatttggtgcatcaaagatggtaatgtcagcctgttttccaacatcgaaagagccgattgttttagcacgatcaactgaataggccgcattaatggtcactgcattgagaatttctactggagttaggcgcatcatgaagcaacccagatgcatggcaaactggagattggctgttggacaagaccctgggttgctgtccgttgttagggtaatggccatcccagcgtccaacatcttacgagccggtgcataggtatcttccatgaggctgaaggttgtagctggcaatagattgccgataacttttgctgcagctaatttttgaatgccttcatccgtaatcaccatcaagtgttctgcgctggtagattccaattcagccgccacatcaacaccaccaatggactcgatctcatcggcatgaatccgcagtttgaatcccatctccttagctttagaaagaagatagcgagattcatctgctgtaaagacacctttttcacagaagatatcacagaactcagctagcttttcttccttcactttcggaagcatttgttccacaacgagatttaaatactcttgggaacggcccttgtactctgtgggaatcgcatgggctgccataaaggttgataccaagtctatttgatgatcccgatccagtgcagcgacaacatccaactgacgtttttccgtttcccaatccaaaccgtaaccacttttggcttcaacagtagtcaccccatgacgcaacatgtaatccaacagtcgttcggacttgtcatagagattatcgaaggaagcttctcgagtcgcccgaaccgtgctcaaaatccccccgccttgagcgaggatgtctaagtaagaaacacctgctaactttttagcaaattcatgttcacgactgcctccatagaccaggtgagtatggcagtcaatcaggccaggggtcgcaacttttccttcacaggattttacttccgtatggtcatcgatcagttctgggtctggttgaccagtcccaactgcaagaatctttccatctttaatggcgatataagcatcggaaagaatttttgcctctgccatctccttgccataaagaggatgccccagatcattcggacaaaacaactggttaaagtgggttaataggatatcagcagacatatgaaacattcctttctatttccattgttattcattttacaattctacaggaaaagcgtcaaaaaaaagtcaaaaagtttttccctcatttttttttgctttattaaaaattatatttttttttgactctatattgacgtttcttcgatacaataaagaaaatataaattcacagtccaactataaggagggttctgctatgtcatttatagacgagaaagaaattgcagctgctatgtctgtcaaacttgactttgatgtcctacctgaaaaggcgacttttcaagaaggaatccgtcgtgcacctgatagaggcttccgcttaacgcaagctcagactgaaattgcccttaaaaatgctttgcgttacattcctaaaaaattccaccaagagttgatcccagaatttctggaagaactaaaaactcgtggtcggatctatggctatcgcttccgtccaaaagatcggatctatggaaaaccaatcgatgagtacaaaggaaaatgcacagctgctaaggctatgcaggtcatgattgacaacaacttgagctttgaaattgctctttatccatatgaattggtcacttatggggaaacaggatctgtctgtgccaactggatgcaatacaacttgattaagaaatacttggaagttatgacagaagaccaaaccttggtggttgaatcgggtcaccctcttggcctcttcaaatcgaaaccagaagctcctcgtgtcgtcattaccaacggtctcttgatcggtgagtatgacaacatgcgcgattgggaaattgctgaagaaatgggagtgaccaactacggtcagatgacggctggtggctggatgtacatcggtcctcaagggatcgttcacggtaccttcaacacccttctcaatgccggtcgtctcaaactcggtgtgccagatgacggcgacttgaccggtaaactcttcatttcatctggtctcggtgggatgagtggcgctcaagggaaagcagctgaaatcgcaaaagcggttgccatcgttgcagaagtggaccgctctcggatcgaaactcgtcactctcaaggctggattagccaagtgacagacagtgctgaagaagctgtgaaattggctcaagcagcactggaagctggtgaatcaacttcgattgcctaccatggtaatatcgtagacttgctcgaatatgtcaacgaacaccaagtccatgttcatctcttatctgaccaaacctcttgtcacaacgtttatgatggtggctattgcccagttggcattagctttgaagaacggacacgtttgctggcagaagacaaagaaaccttccgccgtttggttgatgaaaccttggctcgtcactttgcagtgatcaaagccttgacagctaaaggtacttacttcttcgactacggtaatgccttcatgaaatctgtttacgactcaggcatcaaggaaatttctaagaatggcttggatgacaaagacggcttcatttggccatcttatgtagaagatatcatgggacctatgctctttgactatggttatggtccattccgttgggtctgcctcagcggtaaacacgaagacttgattgcaactgaccatgcagccatggaagcgatcgatccaactcgtcgctaccaagaccgcgacaactacaactggattcgcgatgcggaaaagaaccaactggtggttggtacacaagcacgtatcctctatcaagattgtatgggccgtgtcaacattgctttgaaattcaatgaactcattcgccaaggcaagatcggaccggtcatgatcggacgtgaccaccacgacgtatctggtacagatgctccattccgtgaaacatcaaacatcaaagatggttcgaacgtcacttgtgacatggcggttcaatgttacgctggtaacgctgctcgcggtatgagtctcgttgccctccacaacggtggtggtactggtatcggtaaagccatcaacggtggatttggtctcgttctagacggtagccaccggatcgatgaaatcatcaagtctgccattgcctgggataccatgggcggggttgctcgtcggaactgggcacggaataaccatgccattgaaacagccatcgagtacaaccgtctccatgcaggaacagaccacatcaccattccgtatctggcagatgaagatttggtcaaagaagccgttcaaaaattgttttaacatcaaaaaataaaaactgagaaaggggaggaaatacaaagactcttcctccccaacttctcctataaaaagaggtaatcatatggcaaaaattgttgagtgtattccaaacttctctgaaggacgcaatcaagctgtgatcgacggattagcagctacagcaaaaagtattccaggtgtcactttactagactactcgtctgatgccagtcacaaccgcagcgtctttacactcgttggggatgaagaaagcattcaagaagtggctttccaattggtgaaatacgcttctgaaaacattgatatgaccaagcacgaaggcgaacaccctcgtatgggagcaacagacgtttgtccattcgttcccgttaaagatatcactactgctgaatgcgttgagatcgctaataaagtggctgaacgcatcaatcgtgaattaggtattccaatcttcctttatgaagatgctgcaactcgcccagaacggaagaacttggcgaaagtgcgtaaaggacaatttgaaggaatgccagaaaaattgttggaagaagactggaagccagactacggtgaacgcaagattcacccaactgcaggggttacagctgtcggtgtccggatgccactcgttgctttcaatatcaatcttgacacagacgacctagagattgccaataagatttctaaaatcattcgtggatcaagcggtggatacaaatactgtaaagcgatcggtgtcatgctagaagatcgcaacatcgcccaagtctccatcaacatggtcaacttggaacaattcccattgtatcgtgtcgttgaaaccgttcgtttcgaagcgcaacgctatggtgttcgcatcatcggaacagaactcattggactggctcctgctaaggctttgatcgactctgctgaatactacttacaattagaagactttgactacagcaaacaagtcttggaaaatcacttgttgggttagaaagggagttctatgaaactagttgacttaagtattacggagtttgccaaagttcttggttcagatgctccagctccaggtggtggttctgctgctgctctatctgctgcgaatgggatttcccttacaaaaatggtctgtgaactgaccattggaaagaaaaaatacgcagaatttgaagaccacatcaaaggggttcatgaaaaaagcgctcaactccaagaccaattactagaagccatcgacaaggatacagaagccttcaacgtcgtatcagctgtctttgatcttccaaaagaaacggaagaagagaaagctgctcgtcgtgaagccatgcaaaaagctttgaaacatgcgacaatatctcctttctctatgatggagctcatcgttgaagctcttgaaaccaccaaagaagctgttggcaagtccaacaccaatgcggcgagtgacctaggggtagctgctctgaatcttaaagctggccttcaaggggcttggctcaatgtcttgatcaacatttcaggaatcaaggaccaagactttgtccaagaataccacggtaagggactcaaactcctccaaaccggttctgatcttgcagacaacatttaccaaactattttagaaagtctatcataaacctaacaaacaaaaagaaagaagggattctatggttttatcggatattgaaattgccaattctgtccaaatgaagcccatcaccgatatcgctgctgaacttggattgaccgaagacgatatttcgctctacggaaaatacaaggcaaaaattgatagcaaccaactggaacaactcaaggataaggaagatggaaagctgatcctcgtgacagccatctctccaacacctgctggagaaggaaagacaaccacctctgttggcttggtcgatgctctttcagctattggtgaaaaagccgtcattgccctgcgcgaaccttcacttggccctgtctttgggatcaagggtggagctgccggtggcgggtacgcccaagtggttccaatggaagatatcaaccttcactttaccggagatttccatgccattgggattgccaacaacctccttgcagccttgattgacaaccatatccatcacggcaatgagttgggcatcgattctcgtcgcattacctggaaacgggtggtcgatatgaacgaccgtcaactccgtcatattgtcgatggccttcaaggaaaaacaaacggggttcctcgtgaagatggctttgacatcaccgtggcgtctgaaatcatggccattctctgtctctcagaaaatatccttgatctcaaagaacgtcttgatcgcatcattattgggtacaactatcaaggacaaccggtcacagccaaagacctcaaggctggaggggccatggcagctgtcctcaaagatgccatccatccaaatttggtgcaaaccttggagcatactcctgccatcatccacggcggaccatttgccaatatcgctcatggctgtaacagtgtgctggctactaaattggccctcaaatatgcagactatgtcgtgacagaagccggcttcggagcagacctcggtgctgaaaaattcatcgatatcaagtgccgcatggcgggactcaaacctgctgccgttgtcctcgtcgcaaccatccgtgctctcaagatgcatggtggagttgccaaagcagacttggctaccgaaaatgtccaagccgttatcgatgggctaccaaacctagacaaacacttggccaacattcaagaagtctatggtctaccagtggtcgttgccattaacaaattcccactggatacagaagcagagctagaagttgtctatgaatcttgtaagaaacgccatgtagatgtggtcatttcagatgtctgggcaaaaggtggagctggtggtcgtgacttggctgaaaaagtcattcaactggctcaagaagaaaaccacttctcttatgtctatgacgaagaagacagcattgaaacaaaattgaccaagatcgtcacaaaagtctatggtggtaaaggcatcagcttaacaccagcggccaaacgcgaactgaaagaattagaagctcttggcttctcgaactacccaatctgtatggccaaaacccaatattccttctcagacgatgcgaagaaaatgggagcaccaaaagatttcacagttaaaatcagtaaccttaaggtagctgccggagctggcttcatcgtagctctcactggtaccattatgaccatgcctggcctacctaaagttcctgccagtgaaaagattgatatcgatgcccacggcaatatcactggtctcttttaagaaagaaggcgtcctatggtgactctccttcatcttacccccgcagattatcaaatttctacctggtccggtggccaaaccacccaactctttctctccccagagggaggaagctatccagatcggacctttgacttccgcctctctactgcaacggtagaggttgaaaaaagtaactttaccgatctcacgggctaccaccgaatcttgatgcccttgaatgcctccattaggctcacccatcaccataaagaagtggttttgaacccctttcaaagctacttctttgatgggggagatcctgtatctagccaagggacttgtcaagactttaatttgatttacaaaccttcttatcaggggcatatgagtgctatatccccaaaagagagtgtcaaaagtcagagtcgctatcaattgatctacgctctctgtccactaacactcaaatggggaaccaatcattctcaaactctccaaactcacgagctcatggtgatcgaacaagcatctcctcttcaagagatgacaatcacgtttttaccccatcagtctggggagcaaccgattgctatctggactggactacaataatgttcacaaaggagaaacattatgaacggagcacataaacagtcgattgaggaacaagaaaaagcgaaattcagctttagtggtgccactctatacggtatcaacgccgtaatcggatctggtatcttcctcctccctcaaaaaatatattctggcctcggaccagcctctctagctgtcatgttcggagtagccattctcgtcatgctactatcagcctgtctggctgaaacggcgggctacttcgataaaaacggtggagccatgcaatactcaaaagccgctttcggagacttcgttggctttaacgtcgggattctcggttgggccgttactgttatcgcctgggctgccatgttagccggctttgctaagatcttcatcattaccttcccagcatttgaaggctacaaccttccgatcagtatcggtatgctggttctcttgagtctgatgaacattgccggtctgaaaacctctaagatgtttactctgacagctactgttgcaaaattaattccaattgtcctcttctcactctttgccatcttcttcatttccggtggggtgagcaagggcaacttcacacctttccttcaattggaaagtggaacaagtctcttcagttctatttctagtacagccgtctacatcttctacggtttcatcggatttgaaaccatgtctatcgttgcaggggaaatgcgcaaccctgaaaagaacgttccccgcgctattctaggttctattagtattgtatctgttctctacatgttgatcatcgctggaacaatcgccatgctgggtggtcgcattatgcaaactggtgcaccggtacaagacgcatttgtcgaaatgattggccctatcggagctccactcgtttcttacggagccctcatttcaatcgccggtctaaacatcggtgaatccatcatggtccctcgttttggtgccgcattagcaactgaaaaactcttgccagaagggcttggaaaaacaaactctaagaatgcccctgtcattgccattatcatctctggtatcttcgctttcttactcttgttatctggctctttcgaatcattagcaaccttcagtgttgtcttccgtttcttccaatacattccaactgctttggcagctatcaaactcagaaaaatgtacccagacaaaaaggttaccttccgagtaccatttggtcccgttatcccagttctagctgttgtcattagtatcttgatgattgcaggggacaacctaatgaactttgtttggggtgccatcggtctcgtgatcgcaagtggactctactttgttttccacggcgataaactacataaatctaaagcccttcctcactaattttctttacacactagatgggaacagagacgggagcgaagctcggttttgctccctaacccatctaggactccacgaatgtcaaacctgagcccttttctctatgactcttttcaattttttagatcaatagacaatgggcccatgtttggtattcaaaccgaagtaaacaacactacttccacagaacaactattcataatcggaggttttatatgactcaattgattcatttagatggtaatagcttaacactcgaagaagtcatcgctgtcgctcggcacggtgcccaatgtgagcttgatgaacaagccaaagaagccgttatcgcatcccgtaaaatcgttgatgacattgtccgggaaaaacgagtcgtctatggtgtaaccactggctttggttccctctgtaatgtcagcatctctccagaagatactgttcaactgcaagaaaacctgatccgaactcactcatctggtttcggtgatccacttcctgaagatgccgttcgtgccatcatgctgatccgtatcaactcactcttgaaaggttattctggcattcgtctgtcaactgttgaaaaactgttagaattgctcaacaaaggagtcactccttatatccctgaaaaaggctctctcggagcttctggagacttagcaccacttgctcatatggttttaccaatgttgggccttggacgtgcctactacaaaggagaacttctcagtggccaggaagccttagatcgtgctggaattgaaaagatccaattggctgccaaagaagggcttgccttgatcaacggtacaaccgtcctaacgggtatcggtgctcttgcgacttacgatggtatccaattgctcaaactctctgatatcgctggtgctctctcaatggaagttcacaatgggattaccagcccatttgaagaagaccttcataccatccgcccacaaagtggacaattggcaaccgctcgcaacatccgtaacctccttgaaggaagcaagaacacaaccgttgcaacccaacaacgggtccaagatccttacacactccgctgtattcctcaaattcatggagccagcaaggattcaatcgcttatgtaaaagaaaaagttgaaattgaaatcaactctgtcacagataacccaatcattaccaaggaaggacacgtcatctccggcggaaacttccacggtgaaccgatggcgcaaccatttgacttcctagggatcgccctttctgaaatcgggaacgtatctgaacgtcgggtggaacgcttggtcaacagccaactcagtaaattaccatccttcttggttaaacaccctggactcaactcaggcttcatgattccccagtatgcttgtgcatcccttgcatcggaaaataaaattttggctcaccctgctagtgtcgattctattccatcttgtgaaaaccaagaagatttcgtcagcatgggaacgactgccgctcgtaaagcagcagaaattcttaaaaactcacgtcgcatcgttgctactgaaatcatggcagcttgccaagccttggatctcaaaccagaaaatcatgaacttggtaaagggacaaaaccagcttatgagctgattcgtcaaaaactgaactttattgaatttgacaaagatatcgaaatcttcgaagaactcaataaagcatctgctgttgtcgaaagcgaagaattcttagcaaccatcgaaaaagcagttgacttaaggattcaatactgatacagtaaggataaagcaaaaacagaggctggcgatcttctcagcctctgcatgctttcagaaaaataagggaggcgacaagcttgctcacaaactactatccaatgacctacagctactaccaaggtagcatcgaggacaatccctacacggccaaatggggaatggtcaccaaatttttagacctaaacgacgagactctcacaccatttgaggggatgacctttgggatcatcggctttaagagcgacaaaggagtctatatcaacaacgggcgcgtaggagcggtcgagggtcctacagccatccgttctcaaatcgctaaacttccatggcactggggaaccaatgtaacagtgtatgatgtgggaaatattgacgggcccaaccattcactagaagaactccaagaaagtctctcacaagcgatccagcgcatgtaccaattagggatccaacccattgtcctaggaggcggtcacggaactgcttacggccactatctagggattcaatccagtttggaaaaagatgaacaactggctgtgatcaatctggatgcccactttgatttgcgtccttacgaccaaaccgggcccaactctggaacaggatttcgtcaaatggctgatcatgcgaaagacagggggcaggacttcccttacctcatccttgggatccaagagcacaataataacctcttcctctttaattacgttgctaaaacaccaagcattgatttcttaaccgggcaagacctcttccagatgagccaccaagccattctggatcgaatcgatcaatttttagaaaaccaaactgcgatctatctgtctatcgatatggattgctttgcggtcggctctgctcctggtgttagtgccatccaatcacttggtgtcgatcctaaactagccctcctgcttctccaacacattgctgctagtggcaaactaatcggatttgatgtcgtggaagtttctcctcctcatgacattgacaatcatacttcaaatcttgctgcgacctttatcttttatttgacccaaatattggcgcaacaaaaactaaactaagaatattttttcacacataaaaagcatagaaatcaccattgctagggtatttctatgctttttcttcattttcagcacaatgatctttgcctgaaaggagaacagaccgcttagccttctcttatgatttaggcaagagacactacaggtcttttaatttcttaagaaactgacgatctctatagggatttaagtgttgctctgccacctttttgtagtaattcttatcttctttcaagaaggtgctcagagcagaatctagctcttctcccttctccttttgattagataagaatgctaatagataatgaaccatccccttatcccgtgaattagcagatggattcatcgtcctttcttttcgagccagataagccgcaaccttctcctgatccccttgctgacaagcaattaaagattggtaaaattcgagcaattcttccttccaagggaagcgaacactggacaaaatcttctgagctctgtcaaaacagcggcgagcttggatcaaatctcccttccaataataggcgataccaagatcaatatcaaagacaacacggacggaatcaacagcttgatctcccaccaaacgcagaacctcttctaagtgggtgaccgctacttggaaatggcctctaatttgctcgatttcagcgaggtaggccaaagaagccgcaatttgaatggcatacttggcctgcatgctattggtcaaactaaagcaatcaatagaacgatacagatgccgggtcgcctgctcctcatccccaaccatcaggtgatacaagcccttcaaacgcaactggatcgcgatgacctcatgattattagcttggatggcatcttccaaagccaaatctgtataataggccatctcagagatattttccgtttgaatgcaataataaatgatttgccgataaccctctaagaggaagtcggattgcttgagttcccgcgcataggagatgactttttggatatcatgaatccccttttgatactccccactccgaataaaatagcgaccttctaggtacaagtaacgcagttgtaaatgcttgtattctctatctctttggtgccttgaaaagaggttatctaattctaggcgtagacgagatagctccccaaaaatgtccaaacggctatttgtaccatctgataggaacccctcatctaccttggaatatatcggaaacagctcatgctccagctgaagaatttcttctaaataggtcaactcaaaagataaggaacgcaaaagattttgggattgcttgtattggtaggcaatttccttataaagaagaaggtccgtcgaatcttctaagctttcttccaacttttgcgcaatttgttgatggaagagccgccgtctagctggcgaaagaagatggtaaaagtacatggctaccaattgcttgcaaaattgaaccaagagagcctctccttcttctacgattgagacgatcgctctttcagataaaggctcgattaattctgtcaaaacaggaagctctgtagccgtcaattctgccaagatagacagagaaattggcttatgaaaacaagataggtagtgtagaagggcctcttcctcactgctcatgtccccgagttcctgagaaagataagcttgaatgatatccggcaagggctctaaattttcattttctttccactcttcgatatagctggacagcaagaacggactgccttcactccattcgaccatctgctccatcactgccggctctattgctcccagttcccctttcaagagagcacgactttcactaggatcaaaattggtcaactctagttgagacagccgtttctctacctttaagctccccaagaagttgacgaaggaagctggcagaggctcttcagctgtaaaaattagttgccatttctcctggtttcttctctcctctagttgtttcactttttctagagacactgcatcgatccactgggcgttttcaagcagaatcaggagcggtttttctttgctaaggccttgaagctgattccatacagaaatgagatcatcctcctcttccagaaatgaaatccccatctcatcccccagtttctctagagcttgtctgagatcattccagctgcttccttcgtagctctgactactggctcttccttctaccttaataaaattaaaactacgattggacatcaagaccaactgccgtaacagacgtttcttacctgttccagattgccccatcacgagaaaaggacctaccgcctcacccgtctcgactaaggaaaggtattcctcaagttgcgagagttcttgtttccgaccaaagaaggaaagttcacggatattcaagcaattggtcagtttatgagttcgtttggcttccaaaacggagtgataaagttcctcaatcgctcgactgggacgcacactgagctcgcgatccaataaatcgactagcttataataggtctcaaaaaattttcctaactggtgatggaagctataatactccatcaagagctggtagtttttctcttcatattcatccagctctaccaaatgatggagtaaccgttctatactaggatctgcaaaaccgacctgctcaattttttgatagcagctttcgacatagagcttcctataagcatctcgtttgcgagaagcccactgatcaaagtcttcatcatccttgacatagaagccctctaaaaagtctccccgataaagatccaaggcacttagtggatctctctcaaaaagctgaacatccaaagaaagactcaagtcgggattaagggccaaactgctccgacttggagagacaatgatatctccttcaaagattttattggcttggtaaaccgtattccgtaagtttttgcgagctacttggttttccttatctccccaaagaataccggcgatttcatcgcggttgacctggcccatgactgccaagtaataaagcaaggcctccatcttcgagaaagaaaaccgaatatctttctgattaaaaacaaccttagggggtccaaataacttcaacgtgagatctttcttcattgcaagcgcctccaaaaacttcatattaatactataaaaaaaaagttggcttttagcaagtgatttacccaaataaaaagagactgagaacgattaattctcaatctctacacttcctactaaaagtgttgattaattcccttcaagattcggttgatgagcaaataacgcctttgttgcttgatagacgtggtaagcgacatcttcattgttcatggtgtaaaggtggacacccgccacatcttgagtgaccaaatcaacgatttgatcgaccgcataagccaagccagctgcgcgaagagactctggatcatgctcatacttgtccagaatggctttaaacttccgtgggatatgaacattttcacaagtcttaaggagacgaagggcctgattgcgattgagaatcggcatcactccagcatgaatgggaacatcgatcccagctaaagtacacttatcctgaaaatcatagaaacgctcattgtcaaagaaaagttgagtgaccaaactagagcaccctgcatctaccttctttttaagattttgaatatctgaaatttggttcggagaatctgggtgtccctcaggatagcaagcaccaatcacctcaaaatggggagcttctgttttaataaattcaatcagatccgttgcataacgaaagtcttttaaaggttccacaccagggataatatccccacgcagagccaaaatccgatgaacccctacttcatctaactcatgaagagtatcggccactttttccttagtcaaatagacggctggtaagtgagcaatcgtcggaatagacaattcattttgaatgtaattggctaaagcaaccgtcgtctctttgatattgtatttattattgctagcggtcacactaataaagtgaggagctagctcctgcatatttgccaaggcacgtaagagtttggcattgcctacttcaggatttggaggaaaaacttcaaatgacagagacggtgtgtgttgtgacatattctatccttttcttttgtttcgttgatcaagaactctgagccactatttctaggataagggatgagtcgaaaaccctctacacgatgatagaaggtcctcgaagcatttcttacaagtgttcacgcgcttctttagcggcattaaccagcttgatcaagctttcttttgtttctttaattccacgagtcttcaaaccacagtcagggttgatccaaactttgccacttggtactttggccaagattgcttcgatagtgtgatcaatttcaccgtcttgtgggacacgtggtgagtggatatcgtaaaccccaggtccaacttctgtttggaagtttttcgctttcaactcatccaagatttcaaggtttgaacggcttgcctcaaatgagataacgtctgcatccaagttgtcgatagctgggatgatatctgtaaattctgagtaacacatgtgcgtgtggatttgtgtgtctggtgcgacagttgagtgtaccaaacggaaggctggaatcgcccaatcaagatagtcttcgtaccagtcgctacgacggagtggcaatttttcacgaagagcagcctcgtcgatttggatgattttcacacctgcagcttcaaggtcaagaacttcatccttgatagcaagagcgatttgaagagtagaatccttgatagagatgtcttcacgtgggaatgaccagttaaggatggtaacaggtccagtcaacatccctttaaccggtttgtctgtacggctttgtgcgtagctagaccatttcacagtaattgggttgagacgagtcacatctccccagatgattggtggtttcaccccacgcataccgtatgattgtacccaaccgtttttagagaagaggtaaccagacaagttttgaccgaagtactcaaccatgtcgttccgctcgaattcaccgtgtacaagcacgtcaaatccaacttcttcttgccatttgatccattcgtcaatcgtttcagcaaggaaagcatcgtattcttcttgtgtcaattcacccttacggaaggccaaacgtttagcacgaacttccttggtttgagggaatgaaccaatggtagttgttggaagtgctggaagcttgaaggcttctttttggatttcttcccgttctgcgaaagctggcaaacgagtgtagtctgcttctgtcaaagctgcgatacgggcatgaagttcagcatttgctccgacacgttcagttgcaaagagttctttgttggcagcaagagcttctgcaccttgaccgttacggatggcatccaagtcacgcaattcacccaatttttcaaccgcaaaggcgaaatggttcaaaatagctggttcaaaatcttcattagcagttgtaaatggcacatgaagaagggagcaagaagtcgtcaagacaaccttttcagctggaacttgatccaagatttccaagctcttttcatagttgttgcgccagatgtttttcccattcacaataccagcataaagggtcttatcagctgggaagccacctttcaccaattcaagcgttttcttcccttcaacaaagtcaagaccgataccatctactggcaagtttacaaggtcattgtagacatcacgaacatcaccaaagtaggtttggatcaagacttcaaggcctttcttgtcagccaagagtttgttgtagagattcaagaaaagagctttttcttcagctgacaaatctttaacaagggctggctcatcgagttgaatacgagtcgcaccaagctctgctaatttggcaaagacttcttggtaagtagcaaccaagctgtcgacgaagtcttcagctttcacaccatcttcaaagtcagataattgaaggaaagtgaatggtccaaccactactggacgagtgttgatccccaattctttggcttcttggtactcatcaaaaatcttgtgaccagccaatttcacttctgttgttttttcaaatttaggaacgatgtaatggtagttggtgttgaaccattttttcattggaagggcacggacatcccctttttcaccttggtaaccacgcgccaaagcgaagtattgttcaaggtctgtcaaatccaagttttgaacagatgcaggcacaacgttgaaaaggaaggctgcatcaaggaaattgtcgtagtgtgagaaatcatttgaaggaatctctgagatgccttgttctttaacaatgttccagtgtttagcacgcaagtctttagcagctgccaagagctcgtctgctgagatttcttttctaaagtatttttcagttgtaaattttaattcacggaattcacccaaacgtgggaaaccgataattgtagttgacatgttgtgtcctccaaaaattctaattgacactatcatatcagaagatagctgtcttgtataattgcttttacacgaattttggtatagtcaaaaactataacacagatttaatgggccttaaggccagaaatcaaaagtaaaaactaggacttcttataaagatttcctatagcccaagcgtccctgaaccatttctgagcggattttgagcggattctgctagaagaacagcccctaaaaagcaaagcaggccttctctactgagaaagacctgcctctacgaggaagtaatttcttctatttatcttacttttattaggctaatttgacacagaaggcatcccaaggggctaacttgcctgattcgaggacttgttctaccttggtattggcaatgagaatctctccaaccccattgacgagtggcaactcttgctcttgactggagagattgacaaccaccaaataggcttgctctccttctacccgcttgtaggcaaaaaccttgtctgctgcgtccaccaattcataatcagcagtcacaagccaagggtactcctttctcaaagcaatgagggcttggtaggtatagaaaatagagtctggatctgctagggcagcttctacattaatctctttgtagtttgggttgactgcaagccatggatgacctgtcgtaaagccagcttctgcttcatcattccactgcatcggtgtccgtgcattgtcccgaccaatatggcggatttgatccaagatcacttcgagcggaacctctttttctaaggcttcacgagcatagttgatcgactcaatatcttctacgtcctcaaggctcttaaatggatagttggtcattccgatttcttcgccttgatagatataaggagttcccttcatcaagtgaagcagaatcgctaaagccttggcggatttgacacgatagtccccatcatccccccaagttgacacaatccgtggcaaatcatggttattccaaaagagggaattccaaccttcctcttctcctaattccgtctgccacttggtgaaaatttccttcaatttaggcacatccaattccttagcgtagtgccactttggttgacccggttggtattgaagaccaatgtgttcaaattggaaaaccatggacaattcttgatttttcggattggagtattgcttggcaatctctggagtcgccccccaagtttctcccaccgtaagcagatccttatcgccaaaggtcgcttgattcatttccttcaagtaaggatggagcatgggaccattgctgatgatttcctgatctgggatcttaccgatcatatcgatcacatccatacggaagccaccaattcccttgtcaatccagaaattcatcatgtcatagatctgatgacggagctcctcattttcccagttaaggtctggttgcttcttactaaagttatgcaggtagtattggcctgaagcttcatcaaactcccaagcagagccactaaaagcagaaataatgccattgggctcatcgcgccaaatatagaaatcccgctttggactgtctgggttttcacgcgcctcgataaaccaagcatgctcatcagaggtatggttgaccaccaagtccatgatgattttgatcttgcgtttctgaccttctgcgatcaattcttccatatcttccatggtaccaaagatggaggcaatatcctcgtaatccgagatgtcatagccgttatcatccatgggactcttgtagactggtgagagccagatggctgtaatccctagcttttccagatagtctagcttgctcgtgatccccttgagatccccgatgccatcgccattactatccttgaaactttttggataaacttggtaaattacggcgttatgccaccatttttgttccattttttcttctcctttatgattgtgaaatcactttcatcatacaaaaataggggtgaaattgcaagagtttacaagtcttctccctcttcactggaataaatcacctcaaagagacgttggcgcaagccttcctccaaaggggtgatgaccttcatcaactgtttccaatccttggctcttgaacaagccgcaaataattcgtttttcctatcgtaggccaggttggcagattttaagagctcaaacatccgatcttctttggcaataggacgcgattgcagctcacccatcgcaatttcttgactttgattgtccactatgatagggtccgtctcaaaggtatggagcaagaaacggtgctgtctcttttcaggaagcagcgttagatcacctgttaaatccagcctaatctttctttcatcccaatcgactgttacacgggtttcaaccttgccagctccttctccttcgacgagtacgaaagaacgattgtcacctgggaagaggtgccagtccagcattcctggaaggtccactcctgtctgtggttgtgcatccatagggatgatggctcccgcacgtgcaaagactggaatatcctggctggtcctaaagaccgtgagcttgcctcttccttcatacttccaatcatggaagaaatcgtaccaaacgccggctgggaaccaaacactcacagaagcactatgaaagacaggatccagcgcttctgtaatcggggccaccatgagttcactaccaaagaaatattgattcttcgcttcataagcctcttcttcgtttgggtagtggtaatagaggggttgaaccaaaggcagcccttcttcgtgtgtcgccacattcatagtgtagagataaggcagtaagctatggcgcaggcgcaaatactgcttcatcaagcgacaggtctcaggcgagtaaaaccacggttccttgctgttaaagacattacaagaactatgaagacgattaatcgggctaaaaaccccaaactgcaaccagcgaagagccaagtcttcatcatagtagccccgcatatggccaccgatatcatgactccaccaggtgtagccgatattggaagctgtgctggtaaaatagggttgaaaggctagggattcccaagtcacaatagtgtcccctgaaaaaccaatcggataccgatgactgccaggacccccataacgcgataagatgagaccagcttggccttttcgacaattgtctagataatgatagtgatttaacaaccaaaggggatccatcttgccatgactaccttgctgccaatcaatccaccaaaagtccactccttgatcttccaaaggatggtgaacatcttcaaaataagcttcgcgaaaggctggactataaaagtcaaagctagctgcttcttctttttcagcatccagtcccaagcgttttgcgaccatgggataagcatcttcgaaggcgcgaattccatctgccggatggacatttaaggtcacctttaaaccacgctcatgcaggccatttaagaaggcagctggatcaggaatcaaatctcggttccaactataaccagtccaaccacttccaaagcgagcaggaatcgccgtcttgtgccagtccatatcgatcacactgactgcaagaggcaccccttctgctttgaagcgatccatcaaatctgtgtactcctgactggtataaggccaatagcgactccaccagttgccaagagcataacgtggcaagagggggggctgtcctgtcaaatggtaaaaatctttcaaggcccttagataattgcgcccataaccgaagaaatacagatccacttctggataggaccgtgctctaaacccgctttcatcatcatacaagtaggaaacggaatcgtctaatagagcataaccagccttgctcaagattccatcttccaactccatagccccatcaacctcgtcaagcgtccgactggtcccctttaaggtctccggctgatctccatagtgccaccggctcccatagactgcatactgacccttgagttcgatataaagccgatccggtgcaaaagttcccttttcaaaatggaggtggagatgctctgtatgaagatcgaggacctcttctgtctctacgacctcgcaggcaacagggccaaaatatcgattttgtacaacttgcgtctgaccatcttcaaaaacaccatcttctgagtattccaagcgcaccaaagattccgttaatacggagatccggtagttttctccctctatcactggtcctgccatttgtctttcctcctctttttatggggcatctgactcgccctcttttcatctgcttcgccttaccaggtaagcgcttacgattttactatagcactcaaaaaaaggcctgtcaacacttgacagagcctttcctaaaattttataagatcaacttccccaattgatcaagagatacatgaggctcgagccaaacatatctgccaaggcatgcatgaggaaaaatggcaagagattcttgacgactttcttgtacatgaagtaataaaagagtccataaatgacgccaatcacaaaggcccagagaagcccttgataggtgtggaaggaaaagcggatcagggttgaaaaggccagcgccttccacttgttcttctcacttaccgaagtcattaagcccaaaaagaaaaattcttcataaaatccattgagtaatccataagcaattgccatgggactcagagccatgaacttatggaggatctgcataggatcgataaaaggccaaagactcggacttaggtaattgtattcacccgaaactgttgagattacatccccaaaaagtcccatcgctgcaaagagcaaaggcacccagatcaaggtggaccacttgaagcggatcggcaattgtttaaaatcaaagcgacggagcagcaagtaaagaagagctagagccagcaagatcaactgcaaggtcatattgctggaataagcagctccttcacttgcagtattgctactgcttgtggctactgcagtctgcgcgactggctgaaaactggctaaaaacagctgggtcgagcggacaatgaattgcccaaaaagaatggccgtcacaataccgatatcaaaccatttgagctcttttaagggctgtttgggtcgtattctgttaaaaaaagtcatctttcatccttctattcccacaatggaagtatttttgtttctcttactttagcaatcattgcttaaagaagagttaacctagagaaaaaaacgacctttcggccgttttattttatattgaagacaacgtcatcttaaaaactttccttaggtgaggacggacgtcagcgaacttctttgaagttccatgacttagttttgagcctcttcgctttttaatttatagtctcaaaactcccgagtgtttgaaacaatcatgtttcaaacacttttctcacagcggaaagtttcagtatattgttgattcattttaaaaattaaaaatcatttttctgcagaatcacttaacctattttatttaaaaaataggttatcaacattctgaaacaactttttggccgtttccattacactattagtctaataaatcttggattctatccagatactggttgtctgtcactgccatcacgcgtacctccgctggccatacaaaatctggtcctaactggctccgcaggggctgctcttctgcatctcgatagccaatgatattgagttgatactggtctctgacagccaactctcgaatactctttccaacccaggcagatggaacggtaaattcaaccacgaccacctcatcatccaactggaaaacttcaatccggtgttggaaaaggatcattttagcgagggacatgcctgcttctacctctggcaggatgaccagatcagccccaatcttttcaagaacttccttggtcacttcattcttgaccttggcaatgacgtgctcgacgccaagtgccttacagtgcatgaccgccaggacacttgattccagattttcacctgttgcgatgacaactgtgtcacagttcccaatatctgccgcatccaggaggtccatttccgtaatgtctccaacaattccagttgtaatcatagattcatactggttgatcacatcttcatgatcgtcaattgcaatgatatccacatcctggtcctgcagagtttttaagacactctgtccaaaaatccctaatcccagaattccaatggttcgatttgccataagtctctcctatccgataatgatgtctgccttggcatattgcaaggcatctgcttttttggctttgtaattgttcaagctgaccataagggtcaaggggccgatccgaccgataaacatgagcaccatgatgatccccagccctgctccatttaaggtcgaggtcacattggccgtcacgcccactgtcgctaaagccgataccacctcaaagaccaagtacagaaaacgttgaccatccggcgtcacaagacaaaggccaaagagccccaggataaaggtcaactggaaaatcactgctgtgcccaaagaacgttgcaccaagtctggtgcgatggttcgtttgcctaggttggtatgaggcaacccgagcaattccttgcgagctaagaggatcaagaccaagaaggtggtgatcttcatccctcctgctgtcccacctggtgccccacctaggaacatctggaggatatagacaaagagtgtcacaggtcggactgctgtataatccagtgaggcaaagccagccgtccgcatactgaccgtttggaaaaagctgaccaagatcttctctcccaatggcagggacccaatcgttgctggattatcaaactctgtcaagagactggtcactgtcccaaacagaaggatcgcagctgttaaccagagaaccaccttggtatgaaagcgaagagtccgtcgtcctgattggttacgggccttggtagctaggtcaaaccagaccatgaagcccaagcccccagtaatgatcagagcagataaggtcagattgaccaaccaatcggtctggaaactcatcatactatcgcccccaaaattatcaaagcccgcattacaaaaggcggaaaccgcaacaaagatggagttgaagatcccatgaccccagccaaagcgaggaataaagcgagtcatgagaagcaaggccccgacaccttcgatggtaaaggtggtaataaagatggagcggacaaaacgggccaaactctggttattgctaaaactaaagctatcccgaatggtctgccgatccttgtaactgagcttttggcggctttccataaagaagagaccaataaaggtcaaaatccctaggcccccaatctgaatcaagagcatacaaatcaattgcccccagccattataggtcgaagccaccgactgggtaaagagtcctgtcacacagaccatagagaccgcggtaaagaggtggtcgatgtagcctgctgttgagcttacttgctggacaaagggcaaactcaataagagcgagcccaccaggataaccaaggcaaagctgagaaagattcgccttgctggagacaggcgagtcagcttagcctgccattgtttaaaatatgatttcactaacatagcttcattgtatcataaaaagagaatagacctacaagtaatgaaccatttctaggcataattctaaggccttctcgaatgcttcagagccccagtcacgctgatcataattttctaggtctgcaagagaatctgcggtaaagaggagcaaaccccaaatcgccctacgaagctgggctactgcagcaagggaggcacactccatctccaccacactacacccttcttcaatgcgataggccaccttgtcaggtgtttccctataaaagccgtccgtcgaccaggtcatgacctcttgataaggaatggactcttgttggagaactgtttcaatagcagtcagggcacggccgtccacctctatataacgagaaggcgcgacataatggtaactggctccttcatctcgcaaggccttggtcggaattaaaaaagcattttctgctatatccaccaagaccccacagctacctgccgatataatcttcttcgccccatagccaatcaaccaatccatgaattgagcagcagctgcagatccaactggcgcttgggccaagcagatttcctctccttggtactccataacatagaccggataggtcttggtagctgagacaaagctagctacttctttggcgccaacagtttccgcaaagcgctcaatctcatcctccaagaaagcgtacacacatttttcaggtaggtgcagatcgagtccttcatgagtcggcataaggactgcctgcgggttgtcatcaaactctaaaatgggaatttcatgtttatggatcattccttctcctttttgacaggtatttctttgatgacacgggctggatttcctgcaaggaccacattgtctccgaaagacttggtgaccactgctcctgcgccagcaaccacattgtcacccagcgtcacaccaggaagaatggtgacacctcctcctgcccagaagttgtctcctatcgtaattggtgtcccgtactcgagaccagaattgcgctcgtctggatccagtgggtgcaagggtgtcaaaaattggcaattgggaccaatcatggcattctttccaatcgtaatgggacagacatccaacatggtcaaattgtaattggcatagaaattttctcctagatggatgttgaccccataatccacaagaacctggcgattaagatagaggttttcaccggttgaaccaaaccactctttgatgatagctgccccttttttaggatccacctcttggttaaaggcttcttgtttctcccgagaagcttgagccaaagcccgcaattcagggtccgcaggtctataatagtcacctgcaatcattttttcatattcactggtcataaggaaacctccacgttattttgacatattatagcagaattccccctttaaaacaaacgtcagaataaggctttgcaagaaaaaagatcataaacacttaaaaacaattaaaaacacttgcatcaacttaataaatgatgtagaatataggcaagaacagaaacaaggagcgagctcatgtatcaggaacaacgactcgaaaaaatattagaactcttagaagagcgaaaacagctatcggctaaagaaatggtcgactatttcaaggtctcaaaagataccatccgtcgagacttcgctctccttagccaacgccagctggtccgcaggacccacggtgggctccttcccttaaacaaagaacctggcccttcttatctagaccgtagtcaaaaggctaacaaggaaaagactaccatggctcaaaaggccctgcaattgatccaagatggacaagtgatctttctcgacgtttccacctcgatgaccctgcttgctggcttgcttaataaggaagtcacagtctattcgcattcccttgacaatgccatccagctcagtagtcattctcaggttgactttcatcttttaggaggaaaattctaccctaaaaaccgcttttactatgacgcgaatcaagcacaaatactggacaatcttcgctttgatctcgctttttttggagcgagtagcttaaccaatggtgaagtcacctttgaggatgctgaagacgttgccgtcaaatccctcgtctttgaacgaactcgtaccaagatccttgtggcagaaagttctaaatggaagaaaaacggaaactactatcttgcccgtctcaaacaatttgactattggatcactgaccaaaaaccaagccctgaaatccttaaacaagttggcaacgaaaccactattctctattaggaggtaagtttatgtctcacattcgtctcatcatcagcgatatcgatggcactatcttaaatgatctacaccagatcgattctgatttactgactctcatcccagatttgaaacgcgaagagattcctttcgttctggcctctgctcgttctcccaaagggatggctcctattgccaaagagctcgacatagaagactctcccatggcctgctacaatggagccttgattcaaactggcgagcaggttctgtttgagcatcccttagacaagattgaagcccgtcaatttattgattgggccaaccaacacttccctcaagtttcgatcaacctctatagcggaaaagactggatgaccgatcatctcgaccaatggagccaagaggaagcccggattacaggggaaaaacctctcattctccccctattggatcctttgctggatacgacaaagcccctccacaaattgctcttaattggagaaccagaagagatccaaaccctctatcgtgctatttctaccgacgacttcccttctaccgccttttatctctccaaagccaactacctagaagttactgctaagcacgtctctaaagaggatgctctggttgaactcgccaaccactaccacttgagcttagaagaagtcctcaccatgggggacaacttcaacgacctccctatgctcaaaaaagcaggcatcggtgtcgctatgggcaatgctccgcaagaggtgaaagagggagctgcagtcgtgacaaagaccaacaatgaaaacggggctgggcaagcggttgaaacctatgtcctgatttagtcatccgtttaaaaaggacgtagacagactgttcttttatacaaatctaataacttttataaatccagcttaagaacaactgcccaagctatggtgtactagtcctatgaaagataagaaaactgacgcccgtgtcatcaagaccaagcaacgcattgaaacgacttttttaaaattactggaagaaatgccttttgaaaagctgactaccagcctcattatcaaagaatatctgatcagcaagggaactttttacgctcattatttggacaagtacgacctggcagagcaattattggaccgtgagctggaggtctttgagtctctgctcacccagcgttttgaaagtgcccatacttctcttcagttctgtagccatgacctatatcacctacgtccgccaaggccatgatccactcagcttaacggagcttgtgacagaactcgatcaattctctacctatctccagcactctttttcaaaagatactagataataatagaccaaaggttcgataatggacccttggtctatttttgcatattgagaagatgcaacgatcgagatatgatagaaccatcttaaaacaaacgaggtattcagtatgaaaaatctatctattaaaatgcacatgaacggaaaagaactaacacccgagtggattcaagccaaagaattggaacgtacccaccatgtgattcgagaaatggatgaggtaggtgccaatttcacttacaagggaaaatccattgatgcagacaccctcttcagcttgccttttaaggaagtaaaggctgcttaaatcgaaacaaaactcgccttggggtctgagaaaatactggaactctatgcaaacaagttagccgaatctgacaacatgtggcacgagattgcttcaaaaaccgtgaaaggacacaacttgcagtcggcatacgttgacgtcgatgtcgacggtctgactcttggggatttcctggctttcaatcaagaactaaacaagatggtcgatccagctcttccatttaaaatccatcctgaacactttgtatttgcaggtgtacatggcgggcaagaagtcatggaaatggtggggcaatacggtgagcccacctatcaaaagctcatcatccatccagatgctgaaaagcccgttgccgttgatccagatacgaagttggcgatggtcggagatggggtgctgatgtcagaccaaaatctggacatgatgatgtacgggatgcaccaattcaaaatgaaaaaaggcggtcttcgcatcaaactcggtgtcttcttcccagattcagcaccacacgaaatggtcctcggacaccaagaacatctcgcagtagagtttttcaattccctaaccattgcctatcaaaataaatccttcaaagggaaaatccttaataccatcttgaaatttaaaaaatttgattagatgataggaatctttcttattggactgattctttcccttcttttctcagccaatcctaccattgtcatcaccatcacaagcgtgatgatcttggctatggaagttcattttacgtatttttatatgaaccaaaccaagaaattctcaactccggattgggaattatactaaaagaaaaattctagtagacagcttctactagaattttttcgttagtccatcacaatcatagccttaatagtcttgcgttcgtccatatctttataggcttggtcgatttcttctaaactatagctgtgcgtaaagacgcgtcctggattgatatcaccgtcaagaactgcttttaacaaaacttgtttgtcataagtagtaactgaggctgctccacctgccacagaaatattttgggcaaaggtcgaaccaagggcacggttattgtagtgaggcacaccgacaaatcccatgcgtcctccattacggaggactccaagggcctgatcgacagcagctgcggtacccacacattcaagagccgcatctgctccgcctccaaggatttcacggaccttggcaatcccttcttctcctcgctcagccacaacagctgtcgcacctgactccaaggccatctgttgacggtcttggtgacggctcataaggacgatttgtgatgctccccgcattttggctgcgatcactgcacattgaccaacggcaccgtccccgatgaccactactttgtcaccaggcttcacgtctgctacacgcgccgcatggtagcccgtcggcatgacatctgccagcgtcaagaaagatttgagcatggcttctgtataatctgatggttgccctggaattttgacaagggcccagttggcatattcaaagcgcatgtactctgcttgaaccccatcagaccaattggtgccgatatggcggtcacacgtcccatcatagccagcacgacaagcatcacactccccacaaccatgggtgaaaggtgcgatgacaaagtctcccggtttgaccgttgtaatagcctctccgatttcttcgacaatcccaatggcttcgtgcccactattttgatgacctgcttcaatatctggattgcggtagctccatagatcagagccacagacacaggtgcggacgatgcggagaatgacatcatccggtgcttcgatgtgcggacgatctacttcaatcaggcccacttgcccagcttttgtatagactgctttcttcataggaacaacctactttctattgcttccttatctatagtatacactttttatcgagctctagctctcttcctgatttaaaactctatcatttaatcatattttttcccatacttcttttctagcattttcttaatcaaatagggcattttgacattttcgcggcctttcttatcaatcaattttctgacaaaatctggaatctggatatcttctccctcttctaaaatcttacccgtgctttaaaaaacaatagttgtatgcactgattactacaacaataaacgaattaaggtcaaactaaatgggcttagtcctgtgcagtacagaactaaatcctttacttaaattatttgtctaactttttggggtcagtacatagttccttagtgggagagttatttttttcaccttaagagcgaaacagagttagaatcacttaatagaaaaaggatcaaatctattcagtatagacctaaatcccttacctaaattaattgtaaaacttctatgaatggtacatttctttaaaagttttcatatatattattttttatttagctttctttaaatttattgtattttgtggaagatctaacatatctgaataaaaaatatactcaattcctttacttggcttagttacagaataatttaaatagtatttttcattacgaaattcattatacatttgaaaaatctcaggtacaacatcatatgttaaaatccaattcttactctttaaatgtttcttaattgttctagacaaacttacatgatcctcatgattatagaaattagtatataagccaggtcccttagcataatacggaggatcaaaaaaagtaaatgaattcttcgttttagagatattcaatcgaataaatttttcagcatccatgttatacaatttaattttttctctcatagaagctattaatttaatattttgaataattctttctttattaaatctacaatcaagtttataattcccattttgttgtaggccaccaataacaccagcttttataattcccgagcgatttgttcgatttagaaataatgtagaaaaacctagtgctaataaatctttagatgaatttttattgtcttgaattcttctttgatttttccattcttcaattgaaataggagtggtttcaattaaatgaataagattatcagtatagtttaaaacagagtaccagaatgcatagatagatttatcgtaatcatttaccataattttatctactttattatccaaaattaactttaaagcaattcccatcccccccatataaggttcaatatatgttgttgatccattcaattcaataagttctcgaacaaattcatatacttgtgtttttccaccaggataacgtaatggacttatacttctcatctatttgtcgttctctttctaaagtaatcataattttctatttttgattgttctttagcggccattttgattgatcaatgttataaaacggagcagttttatagaaacatatgtttaatttttgaaagaattcattaacttcttgttcgttgttatcaatccaatatttcataacatagttccaaaaaacggaatcactttgatatatcttcttatttccttctcgtctatcgccatgatgtgaaccaggtaattgtagtttggtttctaattcatctaattgtgaaagaattttatcattaacatactttttagtataaccactttcaataaggtcagcttttttccaaaaggcgtcgtcatttactaggttcatttttagatattcaaaaatgagttcttcgggagatgattttccaggaagactaattaagttatgatttaaagaatttttatctaaagtctgatctccatcaactatggatatagtgcggatacttgactgtttagcatatctatccgtagccaatgcttttattgcttcagaaggcaactttgcatcaactatatggaagaaaggacttatcatgatgttattactttcttgatatgattgaagtagattgttgaaaaagtcctttgcctcatcatcttctaataatacgggaatcaaggtgcttccgtaaatattttgaacgagattattttgtaatagtgcattaattgagtacttattaatattagataatagatcaacatggtcaacttgatcggttagataaatcaatttaccaatcttattatcaagagaatagtcaattagtgaaaaactatgtgtagtgaaaaaaaattgaattttgtattcattcgaatactgttggaactcattcaacaatttaatttgaaattcaggatgtaaagatgcatctagttcatcaattagcaatatactttctacagaattattttcattagaatttatactttcatagtatgcttttagagaaactaatgatgttaatattgttagtaaattatcttctccagcagagattgtatttgaatcaattccctcggtatttgtcgagaactctgtcttagatctaatgccaccgaaattattcaatttaccatcgaaatggatttcatatccagtaaacttcttatagagctcacttaattcatcaagatatttttctggtaacttactaataatatttttaaacttactttcaccatcccattcaccatacgaatatagtctaaacgttcctagatagataattggaatttcaggaagtctatcagaggaacctctagtgtatttaggtttaattgcaaagcgatcatgattatttttagttttactattgtgtcttctgaaatctaaagaaaagttttcaaaaacagcggtatagagtgtaccagctactccaggagcaggatcattatattttttatcccctcgggctaatgcctcaatcttaggattgaatattttattaattttttggatggtcgataaaacaggattacttgatgaattagaaactttttgatgagaattacttatcaaatgaagtatggatgatttacaagttccatttgtaccagctattatatttatattatctgcaaaatctatttctatgttctttagttttctatactgaataaatttaatttttttcatatctaatagttcctataatattcaatatgtataattcatcacttatataataatttacgataaatatttttttataaagcacctttcatcataaacttaaaaggtaataatattaaatatataaagccagtttaacacaagaaatctaatcatgcaaatttttataaaacataaatatcatcaaatttatcttttgttttcaaaataataaaatataatgaaaaatctgcatcttagttaaaactcttcgatcttgcgtttatgagctcggtgagtcaccagatcttcatccacctcaatggtgacgttttgaaaaccacattctttaagcaaggtgcggatatactctttacagacccccatatgcttgtcatgctccagacaaacatgaacaatagcgtttttttccaaatcatccatggttcaaagattgagctgattgatactagcgacatggtccaactctgccaaatccgtcttgattttctggatatccactccttctggtacagcatcgaggaatatcttgagcgtactccaaaaacgtggaatggcttttgagagaataaagaaggaaatagcaagggacaagagcggatccaagatataccagtcggtaaatcggagaaaaatggccatcaggataacagccaaccagcccaaggtatcttccaaaaagtgcaggctaagattcgtgaccactattttgatggcctgcttcgatatctggattacggtagctccagaaatcagttccatagacacaggtacgaacgatgcggagaatgacatcatccggtgcttcgatgtgtggacgatctacttcgatgagccccacttgcccagcttttgtatagactgttttcttcataggaacaacctactttctattgcttacttatccatagtatacactttttcttaggcttctgcttaaatcttactttcccctcttcgattaatcatattttttcccatacttcttttctagcattttcttaatcaaatagggcattttgacattttcgcggcctttcttggcaattaacttcttcacgaaatctggcatttggatatcattctcttcttccaaaatctgactcgtgcttgatggagcttccaactcatcaaaggtctccagttgaggttgatagtcactatagtcaccgtctatatgagactgaattgtcgaaagaagtgccttgattaaacgaggatcgctatttggcataggaggtctgtgataggctacacctagctcttggcaaagctccttacattccacatcattgtcaaaaagaacctcaatatgctcactaataaaagcaataggaacaaaaatatagtggtcagggtggttactctcatctcgcagatattctaaaacatcaggcttaatccaaggaatacctatatcactctcactctgccaagtattggtgtactgctcttccctaagtcctaaattctccgcaatcaatcggctattgtcataaatctggtcgatataggggtcaccaaaatctagtgccaaaactgggacactgtgggctgaaaaaatcaccttatagctatcgtctccaatctgatctaaaatctttcggatttcatcagcccaatagtgaagtagagaaggttcgcggtaccagtccttgataatttggaacttaatttgatcactttctaaaaatttttcatagcccatgactgaatagtatgaataatggggctctaggatcaaacacaaacactcttcaattccgtcattctccatctctttaaccgcatctatgatgaaaggtcgggaaaatttattggcaaagtaaaccgacacttgttctccaagagcggaagctaccaagtcaacttctttctttgttatcctttggagcggcgttccaccgattcgtaggtaatggtcatataaggtctgaatttcatggggttcgggacgaactccacgtcgtatatttgtgaaaaattctgctactccttcataggtaatatcttctggcgacccaaaagtcatcatcaacacagctcttttactcataattactccttgttccacgtttgttctattttatcatgaaaaggcttactttagttaacttagtatcaaaaaaactcctagagacaaactctaagagtttaaataacgttgcttaatggtgatgaatatgtccatgactttgattcacttccaactctttgatcttgcgtttatgggctcggtgggttgctaagtcttcatcaacctcaatggtaacgttttgaaagccacaatctttgagcaaggtacggatagactctttacaaacctccatgtggttgacatgctctagacaaacatggacaatggcgttcttttccagaccatccatggtccagagattaagctgattgatactagccacatgctccaactgctccaaatcactcttgacctgctgaatatctactccctctggcacggcatccaggaaaatcctgagcgtgctccaaaaacgtggaatggcttttgacagaataaagatggaaatagctagagataagagcggatccagaatataccaatcggtaaatctgagaacaaccgccattaagatgacagccacccaacctaaggtatcttccagaaagtgcaggctgagaatggattcattcttggtttgccctttacgaatgacgagactcgctagcacattaatgctgacggctatgattcctagccagaggatgccctcatcattgacaggttgtgggtgaaccaatttcgttatattttccaaaataactaaaacagatcctgtcatgagaatcacagccgttaccatggcccctaaaaggctaaagcgcttgtagcccaaggtatagtggctgtcttcttcacgattggaaatactctccaaaaaggcggagatgccaatagcgatcgcatcccccaagtcgtggaccgaatccgcaaggactgcactagatccaaaaatccctcccgcaataaactcaacaatggcataactcaaattcaagaaaaaagcgatccagaccgcatgttttgtactcatttttccaccttcctttggtataatagtagtagaatgatccctttcactagtattatctctaactctaaaaggaaaggatagaagcaaactgtttaggctgtccgttactgaacagtttgttcaaagtgtccatatgacagcaccggatcgtcgcataaccaaaactcgaaaagctatctatcaagcttttttacaattactcaaccaaaaagactacgaggccatcacggttcaagaaatcattgacttagccgatgtggggcgatcaaccttttatagccattacgaaagtaaggaattattgctagatgaactctgtcaaaagctctttcaccatctctttgagcgtgctgaacacctctcaccacaagactatctggcccatatctttcagcatttcaagaaaaatcaagaccatgtgaccagtctcttgctctctaaaaacgattattttatccggcaactgcgaaaagagctggaacatgatgtctacccaatggtagccgacgaactcatcaaagcccatccaactctccctcactcttacctcaaacacttggtcgtcagccatttcatcgaaaccctcagctggtggttgaaaaaaggcaagtcctacaccgaacaagaagtgattcagttttatttggagattttaaaagtgaaaacctaatcactcgaaataaaataaaaatttctttatttccaagtaatttaaaaattttataacaaattatttgattaaaggaggtaacctcatgaataccaaacaagaatttttatccatcatggctcaacagcctcaaattgcactcgccacaatcatagaccaagttccgaatgttcgaattttgaatttctactacgatccaaaaaaacaaattctctactttgccacaatgaagggcgaagacaaaatcaaagaaatgagcttaaacccccatgttgcttttacgactattcctcactcaggatatagacacgtcaaagcaagaggcattgtaagacaaagtcaacaatccatttttgatttggcggactgccttattgccaaaattcctagctatcaagaatccattgaaatagctggaccagacctagttctgtatgaggtttcatttgatagtgcaattgtagccaaagatttaacaaccatcgaaaaaataacattttaatcaataaatctttgttcttagaagaggattcagaacgactaagaaatttatacttcagcaatcgtaccacaaaaaggggcagaataagtttactcaaaacttattctgcccctttcttagttctaggttccagcagttcttaaatagtatttccagcaatcacacagtttgagctatcaaatatccaacgtttttagaatttcatcaatctcgtcttgttttttacttatatttgagactgattcactttgtttatctatagcattagataactttttattcttgctttctttctttaaaaagctatcatagtcacctgaaagtttggcatagtttaaaaaccttctccttgcttgttcaacagttaactgatataacttttccgcttcttttttattgactatttgaagtgctgaaaatcgttcttgctttaatataaacggaatcatattttcaaacttaggatgcttaaaatcaaggatcatcgggcatttattctctttaatgagtgaaggattgaatcgatatagggaccaataacctgaattaactgcttccttagcttcctcaatcgttctactcattccgccttcaagtcgatgcgtgatacacgggacatacgcaataatgatggatggtcctggatagttttctgcctcctcaaaagcttttatgacctgaatgggattggctccgttagcaacttgggcaacgtagacatttccataagtcattgcaagcatacccaaatcttttttagtactacgatttcctgcagcagagaattttgcaatggccgcagtaggagtccctttagacaagtggcctcctgtattcgaatacacctcattatctaatactaaaatattgacatctgcaccacttgccaatacgtgatccaagcccccgtagccaatgtcataggcccagccatcaccaccaacaatccactgagacggtttgacaaataaatctttgtgagaatacaattcatttagaactggtgtagtttccgagcattccttttctaaagcttgttggagcttcgctgctcttgctcttgttccttttccttcgccaaaatgttcaatccagtcattcattaacaaactcaaatcatgactggattcatttttagcttcctccatgagttttatgagtgatttccgtcgtgtatcatttgcaaccatcatcccatagccaaattctgcattatcttctaataaagaattgctccacgctggaccacaacctttttgattggttgtataaggtgtactagctcctagcgctccccaaatagaggaacaacctgtagcattcgccacaaccattctatcgccaaacatctgtgtcagtaacttaacataaggggtctcaccgcatcctccacatgctccagaaaattccagtaaaggctgttcaaattgtgtataagcaactgttccaggttttcctggattctcttttgctcgcaaagtcatagaaaacgcccaattgatagcttcttcctttagtttcttttcattttctatactagaaatcatctttaatgcttttcccttagatgggcagactttcacacatagttcacatcctgtacaatcttcaaccgaaacttgaattctgtacatcaaaccatctttgcctttaaaatccttcacctggtatccttcaggtgctacatttagttcatcttcttcgactaaaaaaggacgaattgctgcatgaggacaaacaaaggaacacaaaccacattgaacgcagtaagctggatcccactcaggaacttcccaagatagcgattttttttccgtagccgtaccacctaaaggaagacttcctgctaccattccattatcaatcaattgtccaacagaaatgtcacttccttttaggcgactaaacggttcttgaatttgttttttaaagtgatttctataatttccttgttttttagggcgatcttcacaagtcccccactcaggaggaatcgtaattttttctagagcatctatagataaagcaatggctcttaaattctgactcactaacaattctgatttctttgaaaaagatttaacaattttatcttccattgctttttgtgcaatattaaaaggtagtacacctgttaatttgaagaaggctgcttgcatgctaatgctaaatttccctgtcagccctgcttcttgcgcaattttataggcatttatagtataaaactcaatgtgattatttgctataaattttttcatcttagccggcaagcgtctttccaattgctctttattccatggcgtatttagtaagaaaattccccctggtttcagaccttctaagacatcatattgttgtaaataggctggcattgtgataccaataaaatcagtttgttgagttaaataagtggatttgattgcattttgtccaaaccttaaatgagaaatcgtaaccccttctcttttgcgagaatcgaaatagaaataagcttgtacctgtttatccgttttttctccaattatatgaattgtggaccgattcatactgactgttccatctccacctaatccccaaaatttaacttgataagtatcagaaggagtcaagtcaatctcttcttcgatttctaatgataactttgtcacatcatcttcaattccaattgtaaaatgctttttagggccttctttttgtagttccttaaaaactgcaataatctgagcaggtgttgtatccttagaaccaattccaaatcttccaccaataattctaggtctattcggacaatcatataaagcagcttgaacatccagataaagtggctcacctaatgccccaggctccttcgttctatctaatacagcaatagagtgaacggtatctggtagcttttccaaaaagcaagccactggaaaaggcctataaagatgtacctgaatcattcctacttttcttccaagttttatcaaatgatctacaacttgttgaaccgtagatgatacagaccccattactataatgacttcttgtgcttctggatggccataatattggaccaaatcgtagtttgttccctgtaattcatttatttttttcatatatttttgaaccacaaatggaacaacttgataatttctattaacagtttctctttgttgaaaatataaatctggcccctggtttgttccagaaacggttggatgattcgggttcatccctcttgattgaaaaatctctagggcctcttgattgattaatttttttaaatcattcgactgtaaaacattaattttttgagtttcgtgacttgttaagaaaccatcaaaaaaattaacaaacggaactgaacattcaagagtggctaaatgagcaaccgctgctaaatccatgacctcttgaacagaaccctctgaaaggagagcaaagccagactgacgaacagccattacatcactgtgatctccaaatatactaagagcatttgttgaaactgatcttgcggcgacatgaaagaccgtcggcaatagctcaccggcaattttgtacatatttggcaacatgagtaacaacccttgagatgaagtaaaagtagtagttaatgcaccagattttagagagccgtgtataaaaccagcaacaccagcttctgattgcatctcaaccaccctcattttttcaccaaaaagattttttctcccctcagcttgccaaatatctacaagctctcccataccagaactaggagtgatcggataaatcccagctacttggctaaattgataagcgatataagctgcggctgcattcccatccatgatttcttgatgtgccattctatcctttcctcctgactagtatttctttctgtacttgtaaaaaaagctcatcccaagtatttgggatgagctgtagttaactgtgaaacagtactattcgatttcccaaggttacttttaattaggtaaaatcgattccacttctgtatgtggacgtggaataacgtgaacagaaattagttcaccaacacgttgggctgcagcagccccagcatctgtggctgcttttactgcaccaacatcaccacgtactaaaactgtgacaagaccgccacctacatgttctttcccaattagtgttacgttggctgcttttaccatcgcatccgctgcttcaatggatccaatcaatcctttagtttcaatcattcctaatgcttctgaagtgctcatatctaattcctttcttgttagcttaatgtggtaaaattgattccacttccgtatgtggacgtgggataacgtgaacggaaactagttcaccaacacgttgggctgcagcagccccagcatctgtggctgcttttactgcaccaacatcaccacgtactaaaactgtgacaagaccgccacctacacgttctttcccaattaatgttacgttggctgcttttaccattgcatctgctgcttcgatagatccaaccaaacccttggtttcaatcattcctaatgcttctgaagtcatatcgctcctccttcattatttccaaataattattttataaatttaactactgtattatgatttacttgaaggccttaaattatttaatcattttcagccgattatttccgcaaacacctaaagcatttgcctcttctgtatccaaatgacattccagagtgaaggactcgtctactcgaatactgacgttattaattattcctccccgttctccagggacctctaatgaaactacttgatcatttcgaacaccaaatcgaattgcatcaaaatggtccatatgtatgtgtcttttagcaacgatacatccggatttaagttgtacagaccctgctggcccgatcaaggtacaacccggtgtatcagcaagatcacctgataaacgaataggtgctttcagtccaagtttaaaacaatctgttgttgttaattccacttgggtttgctttcttactggacctaatacacgaactctttctacaacacctttaggtcctgctaaagtaatgcattccttgtaggcaaactgtcctttttgggacaatggttttaattcagaaaacgtgtagtttttaccaaaaagtacatctgcatctgcttgagacaaatgaacatgatgatttgagactcctagaggaatattaaacttaggatcacatttttttgttacattttctacttgtttttcacacagatcaatgactgtttctacttgttgagcgggaatctcacttacatcgtctgattgtttagaaacagctgtatcagaaagtgatttttctccacccaaatgctctacagccagataaaacaagctttctaagtcttcactcattcgctcctcctattttgcctttaatgttgataaaatctctcttacaatagcttcattcgtttcatcatctgatacaactgtagcattggaagctgtttcatgagcaaccgacagattatttttctcaaaatttgcttgaatttgctgaggcgtctgattcagaaaatctgcatttggaatagcttcttttttcacttttagtgatgctgagctcagtccgtctactttttcattcggacgattacatacagccacttttggtaaagaatggaaataatcgtcctcagcaactattttcgtaacatccttaattccataggcaactgttttcacatttatcaaatgttctggagtgaggttatctgatactgaacttcctccatccgttccacatcccaatgtaaaggcaattggtagtcctgtcgagatccctgttccgccttgacttccccctgtattgatcagaattcgagaagctggtttacttgagaatttaaatataatatctggatcacttgtatgcaagctcattgtatgcccaataccattttgtagcagacgaatacttaatgcacaagcttcttcccagttttttaccacatagaatcctaatacagttgtcaatttctcaaaggaaagcgggttcccttctccaacacctgactgagggccaattaatagtttcgtatcagctggtacatgaataccagctgcttctgctatggttgttgcagcttgtccaacaaatttcgcattcattacaggatgaccatttgaaacacctcggaagagtaatgaacaaactttgtctgtttcttccttcgtcatcatatagcatccttgagcaagtaattctgaaacgacggcatctttattgacttcttcacaaatcaaagcttgctcagaggcacaaatggttccattatcaaatgtcttagaagcgatgatcgtagaaatggctttcttaacgtctgctgtccgttcaatatacacaggagaatttcctgctcctaccccaatagcaggttttccactactataggctgagcgaaccattccaggtcctcctgtagcaataatcagggcaatatccttcgatttcatcagttcattcgtcgcttccatcgttggattctttacacaaccaatgatatgttcaggtgctcctgcttctacagctgctttcaatattaattcagccgcagcgtaactacatctttttgcagatgggtgtggagcaaaaacgatggcattccgagatttgattgcaataagcgatttaaaaataatcgttgaagtaggattagttgatggagtgattccaagaagcaagcccattggctcagctactttaaatactttttttgactcatcaaaacttaaaacacctgaggttttatattgcttcatctcattatagagtaaagttgaagccgcatagttcttataggctttatcattcagttttccaaagcctgtttcttcaactgctaaatcagctaaatagtaagcattggcctctatcgtctttacaatattttttaaaattaaatcaatttgttcatcagaatagaacgctatcttatcagcagcaacttttccacttctaactaagtcacgcgcttcctgaatcgaacaaagatctacgtcgatagtcgtcataaataatctcctttctaactatttttttcaaaatcatctactaatatggcagtcagttgctttttcgtcagagtcattacatccgtaccttcatcaagaataatatcttgatgagttaatttatcacgtaattcagcaacccttagtttttgcaagcttcttttatactcctgaggtgtcatagataatttttccgtactagagagaaccacttccgtatcctccaatatttctaaagaaatgttcgttttagcctccatttcttcaggaatttcctcaatcacttcctctgttgattcctcgttttggatgaaattatcttcgctttgtgcttcctcaacaaaagcctgattctctttctttcttgggtaaaaagaatccagttggaaatccggtcgcggaataacatgtgaaccataaagtacttgtgcacctaaccgagttacagcagtagttgctgcttcaacagctgtctttacagcaccaacatctcctgtgatactgactaagaccaagcccccttttacaaattccttttttaaaagagtgacatttgctgtttttagcataacatctgccgcttcaatagctcctatcaagccatacgtctcaatcattcccaatgctttcatggcttactcctacatcaaatcaggccaattggacggaaacgttgtatagaaaatttttgctttatccggtgagccccaaacaacactagatccagaaggaacataaataacatctccttctctagccacataagtttggccatcaatttgaactgaaacggtaccagatatcacataatcaatttcttcatacggtagatcccaagcaaatgttgagtgatcaattgttagaaaaccagcactcatctttgattcttctttatggaccaactcttggtactctacttttgctttaggatttcctgtgtcaaagttatctaaacgaaccgtagatccttttacaactttcatgccattagggtgctttacacaacgataaggtaatggaatgggatcctcatctgtctcattaccccctaacattttttttaacaaacaaagaatttcatcgctggtaattccgtgttcatttgtttctttagacgattcacagtgacctgagcattcacttatttcaatgcctcgtttttttgcttcgtctattgcagcaggggtgacaattgtctttggttcaatgtaacaaattgactttcctgcttccgaacattcaataatgtccttagccgtaattaatttcgacatttgttctgtcctcctttaagagaatcgctgaatttctccattttgtctctttacttcatcgtaattttcatcaatgattccaacaatggctgcatccactggcatctcatcattttccatcatccgccttgctgcagaacccgttgctacaataacacggtccccaattccagcgccgatcatatccacaacgactagtagttcgccagatcttcggccaccttttacttctgctaataagaatttcactccattaagcgcttccgatttcctggtagcccagatcgtatctactaattctgcaactaacatgcgactctccttctatattaataaataacctcatcagtacaattcattgcaataccaatcggagtaacaaacattggattttgtggtttaattgttttaatctgagtttctttttcaataatttcctcaatcccagttaagcaactcgtaccacctaccaaaaagatagtatctatatcaaatccttcaatgtttctacttataatagatgcaattttttcgacaacgggttttaaggtagttagtaattctttatggtttgtaggatttcgtttgtattgatcagcttcctcgtaaggcatgtgataagcacccgataccactagtgtaaagtgagtcccaccggtcggctcatcaacacatttaataacttcaccatttttcacaatcgaaatccctgtcgtgcctccaccaatatcaacgatggcaccatctttcattccaacaattgtattggctgcagttggttcatctaaaatagctgttaattcaaaacctgcactctgaacaacatttttaatggcaccaccgtctaataaatctgttccaggaggaatcgcagcagaagcaaaaactaattctgtatctaattgatgctctaactcttctttgagttctcgaacaatctgaacagccccaatgtaatcaactaccattccgtcacgtacaactgacgcggaacgatgagcaccagcaacaattctcttattttcatctgtaacaaccaatacaatataagccgttcccaagtccactccagtgaaataggggcctttcccttcagtgattggtttcttctccactaattcgaactcctctacatagtgatcacaagatttaaataagttatcgtggctcatcagtttctctctcctccttactaaggtaataagaaattaaatttcctaatcgtgataaagtagtaacaaatcgcagatcatctgaatttctatttttttcaatataagctaataaactgaagtaaataggatacagtttcagtaaaatttcacctttttgagtattgataaataatcctacgttagatagttgttctactatgaccgtccgatcaacctctttttcgtttttaaaaaacgtagaagaggtaatatcagctgttcctgatggagttgacagataacgttctagcaattttaattcttctgctatcgccatatctagtccatacaacatttgcgctgctgataacatatcacaacgaacactaagtaattcaaaatcatttgttccaaatgatactgcagaggcttgtggttggcctctaccactataatgatttacttgactccttgctttttcattattatcgtcaataatttttatttttctatctgataagaaggtccttgctcctggagtcagtttttcatcactacgaattgtgaaaacttcgaagggaatatcacgatatgctattcttaaatcattttcagttaaatacttcataacattttcttccaatcgaatttcattttgacatatatcccactgaaagcgaaattgctttcttattttatacactgcttgctaacaaataataaatcgattctaaatcgcttttggtcacttttcgtggatttgctggtgtacatgcatctgccaaagctcgttcagccatttctggaatgtgccttacaaagtctgatttatcaattcctaaatcatcgagagtaccttttattccaaactgagcagatagttgcttgatccctgcgattagtttttccaccccttctttttcattttgaaaatcaaactgtaacatgtttgcgacttttgcatatcgagaacctgttggagttacagttggattggataaagaagaattaaaagcgataacatgcggtaataagactgtattgattcttccgtgaggactatggaaaaaagctcctactgcatgagataaactatggcagattcctaatcctgcattattgaatgagattcctgccagagaagaagcattgtgcattttttctcgagcaactttattattcccgtctttaaaggcgagcggtaaattttcccaagccaacatgattgctttctctgcacaagcatctgaaaagtcactagctccgtcagctacataggcttccaagcaatgagtcaagacatccatacccgaatctgctgtaacagctggaggtacggtcattgtaaatactgtatccaaaatagcaatatctggaaccaaagaatcgttaaccagggcatatttttcttccgtcaacaaatcagaaatcactgcaaaggaggtaatttcgcttcccgaaccacttgtggtcggaatcgctattaaagttggcttaggaaccttctccaagtttgtgtaagttagaattattgctttagaagagtctaaggctgaaccacctcctaaagcgataatcgtatctggtttaaatgatcgaatttcagaaatactttttgaaatactttcgacagtaggatttggaacaactccagaaaaaatcttagtttctacagtcccttgatctaggtgatctaacacatgatgaaccatcccactctttgccatataaggatcacagacaatataagctttttttatagatagattagagagctcactgattgcgtcctcaccaaaaataaatcgtggccccacattaaactcttgtattttcatgaactaccttctttatcatctaatcttattttttgtaaaaaacggttgcactctactgaattttttaaattcaattcaactatttcatccactccagcattgattaattccattttacagtctgaaactctttcttccaattgagtctcatcgtacaatatcactccgatacttggaactcgaaaggccttcgcaaagttcggtgaataaatccctctctgacttttacaagaggcaagcatcaaaacacaattagcattttgttgcatcgctatcagatgctttttcatccacggactccgtaggtaagtactggggaacaaaatcgttttgtcataatacataatggatggtctaatgtgtaagctcgtattattttctaaaaaatataggagttttatattttcttcatcagatggacctattagtagtaatctttttctcatgattttgttaatggaacagttgaaaaacctaaggagttcttgaaatactccaaaatatcttccaatgatgtttcgacactttggacatcaccattaaacatcacggaacctgtaaatcgatcaacaaaacaaatatcaacatttgctgcctttccagcgatatcagctgctatgatggcggtttcattaggagtcagtgatacaatccctatggctccattatgctccacccctaaactttcatataccgcttcaatcggagctgcaataacatgggctagagtaatttgttttcctggtacagattcttggataatccgctctattttcccaagttcttcaatcaattctactcctcccctaattcagttaatgtttcactacagttactgggaaatcagctgctagaatatacttttctattctgtccaaatcatattgacttagagaaggatctccttcaatttcatagtccatacctaattgatgatatttatttacccccaatttgtgataaggtaataaatcaatccctttaaaattagggaaatttttatagggagccaaaaaatcaataattgcttgaatttcttcttcactatcattgatgtcttttaacattggcattctaacttttacattatagccaccttcaatgactgatttgaaattgcttaagattcgctcattgctaactccagtcaattcattatgacgttttgaatccatatgcttcaaatcaaacagaaacaagtcggtatactctgcaacttttaacatgactttgttaggaacatagccagcagtttcaaccgcggtgtttaatccatcttgtttacatgcttgtaataaggctaacgctccctctccttgagccaaacattcccctccagataaagtaacacctcctccagacatttcataaaaagcatcatcctcgtggataatttccatgagttcagaaatagtttttgattctccagcgattgttaatgctccttctggacaacctttaatatcatcaactgtaggttttttcttatcaaattttttgatatctatcggatgatctttgtcttcataatcataaggaatgttatcttttgttttatatttaaagcagatatctcccagtggacaagatgttgcgcaagcattgtacggtttacacaaagtttctttgtacatcatattgggcccaaatgttagcccttctggatttgcacaccatttacaacgcatgtggcaacctttaaaaaatacaatcgtcctgatacctggaccatcatataaattatatttctgtacattaaaaacattaatgcgcgtttcatgttttttattaactgcttccacaatcttctcctaacaattgttgtagcagtttcctagaattggaaaccactacaacaacatctattttcagactacaattgtgttaaaactgtacgagaaataatttcatcttgaacgtctttacacaattcaacgaagaatgcactatatcccgctacacgaacaatcaaatcacgataattttcaggatgtttttgtgcatcaatcaaaactgcattatctaggtagttaaactgcatttcaccatttcctagaatacttgctgtacgaagcaaggtaatcaaactttcctcaccctgaggtgtgtcaagtaaaccagccatgatcttgaagttatgaacaagtccaatgttcatattttcatttgccatcttagatactgatttaataatcgctgtaggaccttttgtatccattccatggtctggagaaataccatctgataaaggtttccaagcccgacgtccagaagcagaagcacctgtaatttgtcctaatggtgtattatttgaaatagacaacgttccatgactaaggatagagtataatgtcttatatttacggtgttcttgttctgtaaattcgatgatatctgaagtaaagtagtccacatagtcatcatcattaccgtatttaggagccgctaaacagtctgctctcacttggtcatatccttcaaagtcagcaaccaaagctttatttagttcttctaatgtatatttcttatcttcaaatactagtttcttaatggcagccatagagtccgcatagtttgctaatccagaccaaacaacacctggtccgaagttatacattgcacctcccgctttcacatctcggccatgttctagtgttccttcatacatgatagacatgagaggaactggagctaattcgcgttgaacacgttgtgaaattaccgtcatgacagaagtccattttgtaacatacttaatagtttccttcactgcatgttcaaattcttcaaatgtcttatattgatcaagagggcccatgtcaggtgttacaggttttccataccaaagtggaataccatggttgagagttgtttcaattaaaattggccattgagtataagctgtagaagtccactgatacaaacgaccagatttttgtggttctacacatcccattaaacaatagtcacgtgcatcttccattgatacacctttggcaagcatcattttaatatgcgtatcgtcaaagtgacaagctgggaagccgactcctgcgcgaacaacgtctacgatcttcttcaaatatttacgaggagatttattattaatccgtgttgcgagtgttggttggtaaactttcacatggcgaactgcgtccatcaatagataagttaaatcgtttgtcgcatcgcgaccttcacgagttacaccgcccacacacatgtttacaaatggttggtatccagcaaagaattgagaagaaccttcagatgtaagccacatcatttcagacatcttgatgaacatactacctgctagttcaaatgcttgatagtcattcatgcgacctgattctttatcttttttatagaatggatacatgtattggtctacacgtccaattgaaagtcctgtttgattttcttcacatagcaataagtgttggatcgttacaacgtattgcattgcttcccagaaagtttctggtttatgagctggaacattcgcattcactcgagaaatcatttccaattccgctttacgttttggatttgtttccttcgctgccaattgagctgcatattctgacatacgttgtgcatagatcatcacaccttccgcagttagaatacgagctttatagaaataaatcttttcaagatcatcgggatttgcatagtctaattctttcaagcaagcttctgcttcagccttgatatccaacatccctttcttcataccaacaacgtcataaccagggttagaatcccccccgcctgattgcgcatgataagaacagtctgatacaaaagattcgccagagagttcccaggcacctgcttcacgatattgtgattcacaagcttcatcgactgatttgccttcccaatatgggaagatttcttcgcgtaaaattcgtttattttcttccgataggaaatatgggtcttgaggacgagtagatactgtatcaatctcatcacggagccaacgccatgaaatatctggagagaatgcaccccaacgagcaccaccatttggtgctccaactagcaattcatggtcttgaataacaagaggagcaatcttacagaactctttaaaggcggttcctcttaggattgctttaggcattccttcatttgctttagaaattttcgttagattaattgcacgaatcaaggaaatcgttggtgtcgcactcaaatattgattcttcaatgcttgtagacgaggggtaatcccatcaggaacatctacaccctctgattctacatattgaggacctgaagtaacaaaatctggttttgttatatcttctgaaacgctttgaaaaattttaactaaagaagcacgatcttcagcgcttaatttcttagtcgcttcttctaatttagcggtaaattcgttcatatccattttggattttcctttctcttataaaatattcaggtagaattatcactcttcaactttaaatccaacctgacgtctatatgtccaatgttttggagtaacattttcagaagtgtatcccctacccgtagtaacccctccaagaattaaggaggtagctaaattggacatcacacctgtcgctacacaaacagtaggagaatttacaacaatacgtccaacttctttaacaagggcaaattctttgataacttcccagtttttagaatgaatggtcaatgtatgccccattttcatttctgctaacaagctcatacatttcttacaggccatctgccaatccggttctagatatacgacaataattggacaaagtaatttttgattgaaaaaatcttcatgattgatgtagtcttgcaaggagacaagtacccttgttgagtcaggtacttcgaaacctgccattttagctaaccatgtagccgaatgacctgcaaaattacacaaaatattattttttgatcgattcaagaactcaatcaattgttcacattctgtctcatttaagatataagcccctttacaagtcagcttatcgcgtatctcttgttcaatgatattttccgtaaccaagaattgttccgatcctggtaaaattccgttatcaaaacttcttgaatgaataatatcctcaatggctttctcaatatctgctgtccgttcaacaaatactgggccggaaccttctcccccataaattaaaggtgtggttgttttaaattgtttattgatatattcaggacatccaatattcacaatcaatgatactttatcactgttatataattccaaaacacttgaatcactaatagtctctgtgattccgatacttccttcagggtaaccaacttgctctgccaagtccactaaacgtttgaacgcttcaatcgtcacttctttggtgtgcttattagcaaccactaccattgtattgcctgacttcatagctaataaaataatgttaaccagaagagtaaatgttggaaaagcaggcaataaaactgatataacccctaaaggtgctcctatttctatggttttttcaccaatatctccttcaagaataccaatataattttcttgttggattgtttgtttaaatttatctagaaaatggtggaatagaaagatctcgtcagattccagaccatattgatttcctgatataaaatctttaattagtccgtctgcttctttttctatttcatctataaatttttcaccataaacatttagttcattttgttcaagattttgtaattggagaaaagatatttgagcattctgaattagattcctcatttcttgaatagaatctaaatcgctatcgatatatctcaaaatagaacttccttattcaaccgtttcgtctggcaacaaaactgacaaagaatagcgatcaataatctttctcaaatcttcatgtggacctgggattacaacatgactgtaaacctcggttcccatgttttcgacagcttttacgcctgcgtcaacagctgttttacatgctgctgtttcaccttgaacaataacagaaatataacccgatgcagtattttcatagccaatcacttctacatcagaagcctttaccatggcatccgctgcttcaagtacatatacaagaccaaatgtttcaatggctccaatagcttgatatctttccatgatattctcctttatcaattatcaatatcatgcactgaaacaatatccccaacagaagggattggtcgtggcataacattatgagacgttaattttccaatagctgctgctgcttgtgcaccagcttcaacagaagcttcaaccgctgctacatctcctacaaccataattgtaactaacgttgaacccacattttcgtaagaaactaacttcacattgcttgctttcaacatcttatcgcaagcttctaatgccggaactagaccgacagtttctacgagacccaaggcctgtcctccatgatatctcatttgtcttactcctttttatcttacttagcaatatatttttgaacagcttgtttaccgtcttcattaattttgtagcgaatacttagttttccatctgtattcaaaccatatcccgtttgaactaaatatccattacattctaatgacattaaatgttctaagaatactggaactgtataatgtttttctttaccataaacacttttaagcgcttccataacttggtaaacatctgcttcatctactgtattcatataattcaatacagccgttctagctggtagaattgccatgttaaacctccttctttcggaagaaatcgagtggatttgttgttacaacgattgcaccgacaataataacgatagaaccaactacaattgttgttgtaattggttgtcccaagaagagaatactgagtaatactccccaaaatgcataagtaatatttaaggacataccaattgctgttccaatcatcgcatttgatcgataccactccatgtaagaaaaaccaactaaagttccagatacaactaacattagcactaagaaaggagatgctatcgttgcggcaaataagccagttgcaccaatcactggaacgatgatgaccatttgaataagccctgaaacaagttgtctcaatgttaccgtcacctctgagtcaagcatggctccaccaaaagctgagatcgttccttcaagcccccaacaaacagcggcaacaatcgctaaaataattcctaaagtgaagtttggggcactatcaggtttgactaagttgataataacagctcccactacacataatagcattcccataaccacacggaaacttaatttttgttttaggaaaatagcagagaaaagggctccaaacgctgctgtagtagccgaaattggaatcgcaaaagctcccgcaaggtacaatcccacaagataggctccgttggcaacaggaccacccagaacataaccaagtaacatgattttcccaggtttcgttgctaacgttcgacctaattctttaaatttcccatttctaatgacattcaatagcagaacacatccacctaataaatcattaagagcacccattacaaatggcgctgctaaaattcctacagctgatttaattggatcgaaaccttgtaaaatcataattacaaatgagtacaacccataaaataaacctgaaataaccccacttctaatgcctgcaatttgaaaagctcttgttgtttccatcattttttgatgggcaaccttctgattgtcagtaggagaagtattgattacactttgactaacttgttccatacgttatcacctctcgttgtcctttgcaaattatttgctgtgtggcaaaatagtctcaacttctgtatgaggacgtggaataacgtgaacagaaactaattcaccaactctttgagctgctgctgcacctgcatctgtcgcagcttttacagcaccaacatccccacgaaccaagacagttactagaccaccgcctacatgttcctttccaattaaggtgacgtttgccgccttaaccattgcatcagccgcttcaattgaaccgactaaacctttagtttcaatcattcccaatgcttcggaattcatgtcactacctccttttaaatttattttctttatacaaatttatataaacgatttttaagtatgtttacattgtcacatacttgttaaatatattgtaaacccttacataagggtaaggtcaaggtttttatgaaaaacttttttatcttcacatcattattttattattaactaaaatatcttcacatctgttataatacaatcgtttttatttttttgaatctattatataaaattagattgttctaattttccaaaaattaccttcattttttactatttttgaattcaattgcaaaaaaaacattccactaaggtcaaacttttctattctaagtcttttataaaaattagattgtttgaattttctgatttttcaaacggatttttttaatagaatacaagcaaaatccttcaacctccgaattgttatattatcaccttcagagcgatctcagatcgtctgacctttaaaaactaatgccattcaacaggatcgaggagcttgttttttaaattttacaaaaaagtgaggctgggacaaaaatcctagcctctcaattatttttggattgtcgagcaagacgcagtggttgagtaggctctactacgctgatttcatcagcttttacaatcctactcaactgtgcggaggtgggacgacgaaatcgaattctaacgaattaccgatttctgtcccactctcactcctaaactcatgatctatacttaatttcatctttttttataattggaataatcacttctgttacaaattcttcttctcgttgtgtcacccaataatcaatcacatgcctttcataagtttcctcttgtagtgatattccattttctttcgcataagagacgatttgctgataggtatcactaatcgtttcgagagaaccaatatgataagcactgagggctaaaaaaccaccaaaagtgtagtgacagtgttcttctgggaaacaatgttgcataatagtagcaaatttaatcgtacccgccattttttctaaatatgaatcatattttaatattactgggccagagacctctaactgattgtcctccaaatatttaatccattcaagattaataattgattctttaaaattatatgagaaactttgcttaatctgacaaaaatgtttttcttcaggatggtatttaagacttatacttgattctttttttgaaggatacgataatgattgatttttcaaacaaagttcaccttcaataatcaactgcatccaatcatcaactgaagccattgatacgagtaacttttctttctcagctttaatttcatcttttcgttgttctaaaaagtaataatgattggaacaactagcttctgaaatcaattctttaattctctttaaatccaaaccgatttgcctgtaatatttaatgactggaatcaataagagagtctccctatcatagtaacgataaccattatcatccgaaacctttttgggcatgatcaaccctagactctcatagtagcgcaacgttttcgtagatactccactcacacttgccgctcgcccgatagaaaataatttgtctgccaccatttatccctacctatcttcatcattcttctatatttcccattgatcacttaaaagttgctttcaaacgatcaaatacttatttattaaaccgctattttgctatcattctactattaattattttaatagtcaatgtaaaactaaaataatattgtttaaaatgatgttttttttataaaaatttaacttttaaacgaattttaatacagaagtaacgaatattaattttgttcaatatagtttaaatatatagattttaaatttaatgtatcctcttattacaaatcataatgtgtacagattcacataagttagatcaataattgatttgaaagctgaatatggtataataaaatgattataacgaccaactcagtacggcaaataattatgacaatataaaatatttgatcaaacttgtaaacttttcagtgtgtaactgaatttcgtatacatactccttataaaaataggttgccttttttaaaaaatttattgatttgtttcattcaactatcgatagattgtaaaacagcctcataaccagactgaataactactattaattttccttgtgccccttaatggattaagaactggttaagctacgtcctgtttcatttttaatttctgaaaacagactgtaaatgaaggaaactagaaaggcggggtttcaatgtccatcatacaattttattttctctttccagcgctctttatgcttcacgaactggaagaaatcatatggatgccatcctttgtcaaaaaattatcagcacagtttccagataatcgaatcctttcttattacacgccttttactttcaatgctattgtcttggagcaatttctaatcctgcttctatcactttttcttagttaccggtttagcaactatactatttacgcaaccattgtgattgcttatatctaccatgtgttcggacatctgattcaaacaattattcttcgaaaatatgtgcctggattgttgaccggcattctaacgagtttgtttgctctatgcaatctcaaaaatgaatttccaattatactttatggttactctcttttgactttgttggttatcattttgaatcttgtattatcatttgtggtacttcataaaatgagtcgtaggtcttgatatataatcctcatatccaaaatctcttctttgaaaggaaaccctatgttcttctccattcttcttagcttttttacggccttcttagcccttgcttttgctcttcttcacttattggcctccctttcagaatttaaaaaaggaaatcacactttaggaaatacatttctcctcatcggaagtagccttgcgaccttatctctcatcctctacttctttttaccgattgtctctctagtcctttggctgatcggctgtggtttgatttgctacggggcctattggaatgggaaacgcaaaggaaacttccatccagctcaccacctgattcggatgggcatcgctctagtccttaccatcttgttagccttgttataagaaaagctcaagtttttttaaaacttgagcttttgtatttgctatttgttaagccatcaacagcatgagaatagggatcaccaccatggttgcaagggtcgtctctgtcaccatgacggctgcatagtcactatcagctccgtaaagtctggcaacaactggcgcattggtcatcacaggcatggcggactggatgataaagacttgcttcatcaggcttggaagaggcacccagtaaacgatggtcgccatcaagagaggggcaaccaggaagcgacctagtagaatcaatagctgatcttttcccagcaccaactgcttcacgcctacatgagacaccgacaaaccgatgaatatcatggataagggggtcgttaaattgcccagatactgcaaatcactggctagaaaggctggtaacttgatctgcagcatcaccaagactagtcccaagagaaagcccatcaggggcggagaaaagacttttttcagactcgttttgagatcaaactgcgcttctccctcaccatccctctgaatcagataggttcccaaggtccagaaaaaggtcgtattacacatgtaatagatcaaaacatagggaatgctggcatccccaaagagggcttggttaatgggaagccccacgaagatggtattggagttaaaaaacatggaaataaagaggccacgacgatcctgtctcaccgcaaagatccttgctactcctgtcgcgatgccaagtaaaataaccatagacagggcaggaaaccgcaaggctggcaacattttaagtagatctgctgctgtgaagcgctgcgtaatggtgtagagcatatagcagggaagagcaacttgagtgaccaatttagcgagtaggccacgcgacttgtcatcgaaccagcctttttcaccaatgacaaagcccactaaaatcatacccaggatgacgagaatccctgatatgctcctcaaaaagatgtccatgttctccccttttctttttataaatttgaactagaaaatcacattttttacaagtctcaaaaactactctagtatatcataaaaagaggtggggcagtatgcccaacctcatgtattttattaattgtcactaatatcccttcttagctgccttgctccattggtaccaaccaactagactgttgataaagtaaatcaagaaaaaccaataaaatggtggggactatggcgaaaatagatgattcagttaaaaagaaagttccagaattgcgatttaaaggattcacggatgaatgggaacagcgtaagttgggagacgaagttcgaatagtgatgggacagtctcctaattcagaaaattatactgatgatcctaatgggcgctaaaaatacgaagacctatgaagacctattttgtattagtcaaacaaaagatccaaaagaaatggtatatgattatgaccatgaaacaaagtaaaaccaaaccgagtgatctgaggaagcacccgatgatcatgaaacgttattaaacacaaaagtcacccctgtgagttcttgccagaagctgaagttaatccttcaacctggaaaacccgcagaggtgactttttctatacatctcgatttttctggtaataatcattaaccgataaatatgtctgtgaatcacccagagactccgctatgtccataatccgcggtggtagtaatcccactcgctggacaagttcgtgatcgctgaacaattcccgtggactgccggcgaagccaaacttcccgtgttccataacatacaccgactcaaactcggcggcgacccaatccatgtcatgggtgatggtcacaacttggtggcccgaatcagccaactgatggaaaattgcggtcaacttgcgccggctttcccaatcaagcgacatcatcggctcatcaaataaataaatcgccggatccactgccaaaactgtggcaacgcttaacagcttgcgttccgacaatgacaggtcatatggactttcagctgttttatcatccaagccaactctttttagagccgctaaagcccgcctcgtaatcgtgtcgcggtcatccatgacctgcgcgacactccactccacctctcgttgaacggtcgggttgaaaagctgatcgtcaggattctgaaaagtaatcccaaccttcagtaacttttcgactggtttaagatcattaaaattttctccatcgatcttaatcacaccggtttgtggtgtcagcaagcccgtcaacaatttgaagagcgttgatttgccggcaccattttggccgacaatcgccaccatcggatcggcgaagtgtttgtcttcaacatccaagctaaaggaccgttccggataagtgaatgtcaggtggttcagttcaattgtggacataaaaaacctccttcagttcagcgtcattcaccggataccggccatcagccaagtgccaatccattttttgagcaagttgctggattgtcggggctggaatctgccagtcagctgccaaatgattaaacacctcacccggcctgccctgggctaccatttgaccctcgtgcagcacccacacaacgtcggcgacttcgcacaaatcgtcaatttcactggtgacaatgaagacagtcgtctctttgacttgggccagccattggaaaaattgtcggcggccaaggggatccatctgactggtcggatcatccataatcaaaacagccgggttagtcgcaatcgccgtggcaattgccaaccgctggctctgaccaccggaaaggctctcgggacgcaaattcagctgttcaatcagccccatttgcgtggcaacttcttcaacccgtttttgaatcagtccttcagccattccctgattaatcaagtcaaaggcgatttcatcggcaaccgtgtctgccaacccgcttagttggccagctggattttgcagtacaactccattcatggcattataaacgggccaattgtcggacactcgctggccaaacatgtgccagtcgccctcaatctcagcagacaccattttgggaatgacccctgccagcacacggcacaaagtcgatttgccggagtggctattcccgataatcccaaccacctggccggtatgaacctccgcgttaatctgacgcagttgtggttgctcagtacccggataacgggtggtcaaattttcaattacaatccgtttatcttcgtccatatcttccacccaatcaataaaattgccaatccagtcagaccaatgtgcagcgtccgcgacaggcgatacacgcgctgggaggttctgacagtccggttgagattatcaaaacctctcagttggagagaaatcgaccgcgccatcgattgatccaaggtcttaatcaccaatggaattagaaccggcaggactgactttaatttctgaatcaacgttttttgcggattggttccgcgaactttttgtgcctgctggattttccgcatattgcgcatcatttccggcaaaatataacacaccgacatcagaacgtagacggttttataagacaatccggacagttccaaataggccgcgttttctgaaatactcgtggtcaccataaaaaagccactggtcaaaataatcaccaatactcgacaacccagagtggtggcgtaaatcagtccttctttgtagaacgacaccccaagcacagaaaacagcacagtttgattccgactgtaaaataacccttggatgatcagcatggtgcaaatcagaaacaggctgaatcccagcgccttaaagatggtagaactcaatttggaaaataacaatagcagtgttgcgacaagaattaatccggcctgaagcaataaattcatactggcaaagctcaacaacgtcatgtccaagatgaacaagagcttagtaatcggatcgatcacctggtaccacttgagcttgacccgtggcgctccagaaatcaatgtttgatcagtcatcatttatcaccgctaaagaagtgcaccatccgcttcggcaactgacgatagatgaagaatgccaggtaggccacgcagactttatccaaaatatccaagacaaactcatcgataaatgaggccagccacactggtgcatgattggcgaccattaccgcaaacaatgagtcaccccaagcgataccggtctgaccaccccaaaagatgacgttgagtggcgttgaaatgacagctgaaacgatggcaataataatagcagaaacaaatactcgtcgcgctgacgagaaccacccattggcgtgcaaaactccgacagcaatcccaattccgatgctggtaatcgcatacacggttgaaattggcgataaggtcagcccatagatcacgttgttgatgaaaccactgatggcaccggcaaccggcccagccaacatgctggcaagaaaggttcccaaagaccccagccaaacgggcaactttaacccctccgccaaggctttggcaacatagttaatccccacggcagcgggaatcaaagtcatggtggcagcacttaacttaaatttccacatactggtacgatgaatcggttctgttttcataatcttctccttttgtttttaaagagccgtgtctgtttagactttcggacgcaacgctctatagatttttgatttgaactgtctttcctttcacagatcccttagtcgacatcagggactctcttgaaaatgattgttcaacagttcacaactaatcatacgccgatttcatcagaagtcaagaattttctgaagttttcttgaaaacgttcgggaattgaaaaaagctacacaaagctagaggaaattgtccttactaagtcataaaaaagacttcaccttagcctagattggtgaagttttttgatttttcttcttatctcgtacccacagcatagctagcccaaagaggtgactaccaaacaggccggtcacaaaaatcagcttgcccctatctggataagtgagggggaggctgctaaagccatagcgagcccactcgataaagatcggatgcgaaaagtaaagggctatactcatttgctttaaatactgcaaatcatagcttttcaaaaaggacgatcgcaggcaggcattgaccaaataaacggtcacaaagggaagtagaaagaaaaagttcttatcaattccttcgtgttgaaaaatgatgattccttctagacagagcaaaccaaaggcaagagctagcttttgccaacggtaaattctaaaagcttgtgcatgaaaatgatcatacagatagtaacccatatagataaaaatgggcgtgtaaaagagaccatttcgcgctgtaaaaaataaattgctgtagagctggtagcctttaagaagacttgtagtgtccagataagccgaataggtctcgatcaagccccagcaatagaggagcaaggccaggaaacccgtccaaaccatgcctaggcgtttgactaattgattgaccaaaaacaagcccagcaaaaaggccgggatataccagagttggtagcacatgcccagatagatcagtgcgatgagaacacctgcaggaaagagatagacaggaagatgaagactagaaaaaaagacccaggcatacggaaggtaaacaaaactccaaaacaaataggtttttacgattttgaccagataggccttcattttctgagaattccctagtgattgcttaaggaaaaagctggcacagacgataaaaaatggaaccgctagccggccgagcatactcttaagaccaaaatgcagtggctcataggaggtcaagcgaccactatgcaccaatatcactgcaatcgcaaagaggtattgaaaaaagctgatactagaggtgttatagaggggattcttttgcatattcctactccttgcccaaagcagtttctatggttattttagcatgaaagggaaggccaagcaaggaatcttgcatccttatctaccttttttcctctatttttgatatactcaaagcatgcataaacaaacgattattgattttaaagaacttggattgcgataccttttcaccaagcccataaaggaattaaaaactaaaaacctcgaccaggtagaggctcttcttagagaagtcgaagcctaccaagagaaaggcttttatgctgttggctatgtcagctatgaggctgctcctgcttttgagaagaaatttgctgtccatccagcacctcttctgggagagtatctcctctattttactatccacgaggaggtcgaaacccttccttttccagaggactatgaagctgtggatcttccagccaattggaaggaagaggtagaggcgcctgcttatcaagaagccatcgagacgatccatcaccatatccgccaaggagatacttaccaggtcaactacactgtccagctttctcaagagctaaagtctgacccttttgccatctacaaccggttagtggttgagcaaaaggcccattacaatgccttcatccagcacgatgatgtctccatcctctccatcagccctgagctttttttgagcaagacgaccggctactgaccacgcgccctatgaagggaacgacgcgccgtggtctcactaaccaagcagatcttcaagaagctgcttggctaaaagctgatccgaaaaatcgagcagaaaacatgatgatcgtcgacctccttcgcaatgatatgaaccggatttcggagattggaagtgagcaggtgacccgtctttgccaagtcgagcaatactccactgtttggcagatgacctcgaccattgaaagtcgcttgcgatctgagatcgacctggtccaaaccttccgagctctctttccttgtggctcgattacaggagcaccgaagatctccactatggaaatcatccaaaagacagagaaggctcctcgaggtgtctactgtggaacgatcggcatccttcttccaaaagggaaacggatttttaatgtagctatccggacccttcaaatgcagggggatcaagccatctatggcgtaggaggaggtatcacttgggacagtcaatgggaaagtgaataccaggaaaccaagcaaaaatcggctgtcctttaccggcaagagcctcgctttgagctcctgacgaccggccgcatccaccaaggagagttgtctttcttagaccaacatgtaacacgcttgagaaaagctagtcgctactttgcctatccttatgatgaacaaaaactcctgaaagaacttcaagaagagctcgctcatttagatctcaaccttgactatcgttgtcggattgccttgcaaaaaaacgggaccttccacctagtgatcacggagctgacagacttgcccgctagctatctacaggcccaactgacagagcagaagcttgatttagcaacgccatttacttatttcaaaacgagtcagagagaccatctcaaccagtcagatcacgagcaaattttccatctgccagacggaagcttgctagagacgacgattggcaatctggtgctggagatagagggacaactctacaccccaccagctcacctccccttactcgatggcatttatcggcgccatcttcttgagacccagcaggtggaagaaaaactcttaactctgaacgatttaacagacgctgatcgtatttatgcctgcaatgctcttcgtggtctctacgaactcgattttcaaagaaaggattcctgatgaaacttatttttttacatggactagggcaagatgtcctctcttggcaaggagtccaatttgcactttcacccttgcactccaaaacttttgatattttctcccacccaaaagaaagctatcaggaagtcaaagaaaggttgatggagcgcctccagcaagaaagcgaaccctttattctggtaggactctcactaggtggcgtgctcgctcttgatctctccagacaagacttcccgcaactcaaaggcttggtccttgcaggaactcaatacaaactcaacaccaaccccctctatcggctccagatccttctctttcgtctacttcccaagcatgtctttgaaaaacaagatgccaataaacaacagatgcttcaaatcttgaccgaattaaaagggctcaatttaaccgataccgctaaagcttgccccctccctagcttggttgtttgtggtagcagagattgggccaatcaatcttcttctaaaaaattggccaagctcctgccaaaaggtcgctatcaagaaatcgtagacggaggtcatctactcaataccgagaaaccctatgaactcgcgcaagccatcaaagagtttgttgctgaattttaaaatgaagaggctaacttttagaacagttattcttaatatatataaagtcatttttaaaactttccttaggtgaggacggacgtcagcgaacttcaaagaagttccatgacttaatcaagatacaaagggcgtctgcggataaagtcaaaataggaggtttgacacaaaatctgtagattctaggagaacttatctttttgacacaatccgcagcccgagttcaatttgttttgaaacccttcgctttttaatttcaaagctcaggctaaaacagtttcccaaactgttttacttccaaaactcccgagtgctagaaacatgatcgtttctagcacttttctcacagcggaaagttttaatatattttggattgaatttcaacattagaaattctttttatttctttgtagagtcacctattcaacatttttattttataagaagtctttaccgcaattttttagaaatatttgagaattgcttgatagttatttgaaaagcaagctgtatactaagagtgtaaagaaaacaactagtcatttggacgaaggagaaaaccatggaaaaagtattagaaatttcccatttgagtaaaaaattcggtcatcaatacgccttaaatgatgtgaatctcaccattcgcaaaggtgatgtttacggactaatcggtaaaaatggcgcaggaaaaaccacccttatcaaggtcatcacccagctgattcaagaaaccaacggaagcgtctctctctttgcttctacaaatcgctcccagtggacccaagccctgaaacgggtcggatccgtgattgaaagtcctgtagctcacaagcatatgaccgcctatcaaaacctggtctactactgcaaggcacgccatatccccaaccccgaccaggtcatcaaagaaactttgaactatgtcggcctgaataatacgggtaagaagaaattccgtgatttttcacttgggatgaaacaacggttgggaattgcgattgcgctcattgctaagccagatttccttattctggacgaacccatcaatggcctcgatccagtcggaatcaaggaattccgtcagatgatcaagcgcctcaatgatgaactcggcatgaccatcctcatttccagtcacatcctgtccgaactttatctggttgccaatcggtttggcattgtcgaccaagggcgcctgatcaaagaaattagcaaggctgaattcgaagaacaaggagaagactacatcatcctcaagaccagccagctagcccttgcgagtcaactgatccaggatcaactccatcaccgtatcaaggtcatcgataaggatggagaaatccatatcttcggacagactcacgatattaaagtcattgtcaaagccctcgttcaagcagatattgacgtggacgaaatctactatgcccgccaagatctggaaaaattctttacggacttggtagattagtcaaaccaccgtctcgtattacttatcccacatatttcatttaggagatttatcatgttgcataccattcaagcagatttttacagactttttcgctccaaaggtttttggattacagaagccattctcgttcttaacatcctgtctggagtcatctttggagctaccggccacgtcggcgtcaatacggaatccaaattaccccaagcaaccgaagtttggacgggctttaaagccttgaccaactactcttccagcatcagtgtgaccatcctctttaccattattgtcatcaccttggtcctgggaacagacttaacgcaaaacttatacaagaatagcctggcctatggcgtttctcgcactagctactactttgccaaaagcgcagtcgtcctgaccattgctctctttcaatttcttgtttcttatggtctcgtcttcttgatcgcgaccctctacaatggacttggcaccatgccagagcacttcttggctcattttggtctgactgtgctgattcagttcctctgcaccttggcttgggtcagtatcatttccttcctcctctacgccagccaatccatcaccttggccttcgttggctacttcatcggaaatatcctcttaagcctgcctgcgctcttctttaaagatattgacattttccactttataaacttggagttccaatattccttggtccaaagtacaacagcaacgaccaacactctctcgattgcccttggattcatccttgtttttggcttcctaggactcgctacttttaaacacaaagatttataacaaaaaggcttgagcggtgctcaagccttttttcttagtgtaatggtcaagataaaccaatctgcctctgtcgccagttgcaagtcgccgcctaagatctctacaaaattttgaataatgtagagacccaagccagaagactcttctgtatccgacagattttcagagtagaatcgactagccagttggtctaaatgttggatcggttgttgcacaatattgcgcagctctacccgaatcgtgtccgcgtccgacatcaaggtcaaacgcgcctgctcctttccatgcttgaggacattgctgagcatattttgcaagaggcgctcccaaagctccggatcggtcgcataatgaagatgctcttctagctctacctctagggcaatccccgcctcagacaagctatcataatactggaacaactgctgggttaaaacttggctgagattaacgtctgaaatccgaggctgaatagctccctccatcaagcgtctgtattccaagagagattccaggcgttttgagacgacttgaagattggaagcaattttcttcagcttttcctcttcctgcgtcccacctttgatgatttgttgggtatagcccgatgcaatggtcaaaggcgtccgaatatcatgagcaatattactgatggccatatccaaggtctttttctcttgaaaggcaatccgattggtccgctcgatatggtcaaagagatcactgacctgcttggtcaaggcgaccaattctttttttgagacctgagaggtcagccgtaccccactcccgctttgaagcttcttttgaatctgctcctgcaaataccttaaggcagaaagcaagcgagcataacccaagcccaagagaaggacaaggacgacaagaattagaactaaaacccacattacttgtctcctttcaagcgaacacccaagccccagaccgtttcaatatagtcctcatctgggtcaagctgggcaattttctttcgaagattgcttaattggacattgagggtattgtctccaggcagatagacttcttcccagacagcttcatacaattcttctttggtgaaaatcttctttggatgcgccagcaaggtctcaaaaatttgaaattcttttttgcccaatcgaagcgtctgttcgccggactccagttcaaaggtttctggatttaagaccaaattcttaaaggatcgcttttgcgacgcttgagattcctgtgctaccgtcggttgatttctcaactgcaccgtcacccgagccgccacttcgtccagattaaagggcttgacaatataatcattggcacctgcaaggagatactggctaatgaggtgtttgtctcccagagcggtcatcatgataaccggtgtctgactctgcaaacggatctcctcaaggacctggtccccatttttcccgggaagcatgatatccagaaggaccaaatcaatggcttcttgctggaagagccgcagcccttctgtacctgaaaaagcctgaaggacctcatgatcttcacttaagagactgtataaaatttcttggatatcattattatcctcgattaataaaatccgtgccacttgcctcgctcctttttccttttcttgcgaaatcagttctattcccctagcctatcaaataaagggaccttcgtcaatcaaaaatgcaaagaaaacactcgaccaagtgaaggattcctcttgatcgagtgctcatttaattgacagaagccccatttgtcgcaatgacttctttgtaccaatagaaggatttcttacgtgagcgggccaagcttcccttgccttcgttgtcccggtcgacatagataaaaccgtagcgcttcttcatttctcctgtcccggcagagaccaggtcaatacagccccaagtcgtataaccccagaggacaacgccatcttcgttgatggcctcccgcatggccttgacatgggcagccaggtaatcaatccggtagtcatcctcaatctccccgtcttcatttggggtatcaacggcgcctagtccattttctacaataaacataggcttttgataacgatcccagatagtgttgagggtaatacggagcccaagagggtcaatctgccaaccccattccgagctttctaggtaggggttcttcagagaggcaaagatattgcccgctgttttctccctttcagctggatcccctgaagcgacccgactggcatagtaggagaaggaaataaagtccaccgtatggtctttcaacaattgcaggtcctgctccgtcatctcgaccgtaattccctgacgcttccactctttcttagcatagttagggtattccccacgcgcttgcacatcgatgaagaaatagttcttgcggtcttcttctagaccagcccagacatctcgtggagcacaggtatgcggatagttttgccctgctgctagcatacagccgaccttattgttaggatcaatctcatgggctagcttggtagcaatggctgaagcgaccaactcatggtgagccgcctggtatttgacttgctcctcattctccccttcttcaaagcagagacccgctcccataaaaggcgcatggaggatcatattgatctcattaaaagttagccagtatttgaccaaacccttgtagcgagtgaagagggtccggcagagtcgttcataacattccaacatcttacgactacgccaacctccatactcggtaatcaaatgcatgggacagtcaaagtgggtaatggtcaccaagggttcaatgccatacttgtggcactccttaaagaggtcttcatagaactgtagacctgcttcattcggctctagttcatctcctttagggaagatccgagaccaggcaatggacaaacgataggttttaaagcccatttccccaaagagcgcaatgtcttccttgtagcgatggtacatatcaatgccatctttagctggataaaaatagccttcttcaaagtcgaacatctttttctgacccgtaataatggcgtgacgatcaggcccaatcggcaccacatccacattagccaagccacggccgtcttcattataagctccctcacactggttagcagccgtcgcaccaccccaaaggaaaccatctggaaattgaagtttgtcggtcatctctctacctcacttgatttgatagttctattatacccttctctttccaaaaaatcctacaagatcctatgaaaaactgatactattctaaggtaactcctacacttgggaacataaaaagaccggatggctccgatctttttaagttccactccaagaacgtttaaattttttgataatagaattacctacttcatacgataaaaatcaagcactagtccggaagggtctttaactagcaggctttctgttccccaatcggttacaactggaccgtttaaaacctggataccaagctctttcaatcgtttgtagttctggtctacatcctcaacctcgatatgaagaatgattcctgactgaaaattttccaaaggaatcaaatgattttgagacaacatgagacagtgactgccaatcgtgaactgagcaaaactgtcgtcaacataatcggcttttttatccaaaatacgctccaagctagcacaaacttgggtaacatctgaaacgataatatctaattgatttaaattcatttcttatcctccacaaaaagaccggattgctccgatctttttattttccacgagagaaattatttgattgcgcgtgattgcaacccttcttcttccaagaagaggcggaatggtacgagttcttctgcttcgtatttttccttgaaggctttgatggcttcttctgagtgttgttttggatccaactcaagaacttctactggaagtggacggtgttgtgtgatgcgagcatcaatcacaactgtcttaccttctttgttcaatttaacagcttctgcaacgactgcatcgatatcttcgatacggtttacagtgaaccccacagcaccttgcgcttcagcgattttcgcatagtcagcattagggaagtcaacaccaaacaagtgtttgtttgtgtcttcgtatttgttcttgatgaaggcatactcagcgtttgagaagaccacgttgataactggaaggttgtattgaacgttcgtgatcacgtctgggtagcacatattgaaggctccatcacccatgatgttccatacttggcgatctggattgtctttcttagcagcaataccaccaggaagggcgattcccattgtcgcaaagagtggagatgtccgccacatgttcttaggagtcatgtgaaggtgacgagttgatgtttgagtagagttaccaacatcgattgagtagatcgcatcttcatcagcgtatttgttgatagcgttgtaaacttggtacaattgaagcgcaccctcagttttaccttcgagtttgttcatgtaatcacgccagttttggttgttcttcacgtttgcacgccaccatggagtagactcaactggatttactttgtcaaggattgctttggctgcttgacctgcatcaccaaggatagaagcgtcaagagcatggcgtttaccaagtttgtaagggtcaatatccacttggatgaatttttcagtgttcttgaaggcttcgtaaacttcagcaaatgggaagtttgaaccaaggaaaagaactgtatctgcttcaaagaccacttcgttggctggtttccaaccaacacggtatgcagaacctgtcaaaccttcgtagttccattcgaacgcttcgaagtttttaccagttgtgatgattggtgctttgattttacgtgacaattcagtaatcacttcaccagctttcacaccaccataaccagcatagataactgggcgttcagcattgttcaagatttcaaccgctttatcgatttcaacttcgttcaaagcaggagcgatgaatgaacgctcgtaagaacctgaaccgtagtatgagttttcgtcgatttcttggaaaccaaagtttactggaatttcaacaacagctggaccttttttagaaacggcagcacggcaagcttcgtcaatgacttttggtaattgttctgcgtaagctacacgtttgttgtatacagcgataccgttgtacattggattttggttgagctcttggaaggcatccatattcagctcgttgtttggacgtgatccaagaatggcaaggaatggagtgttatccatcgctgcatcgtaaacaccgttgatcaagtgagtcgcaccaggtccacctgaaccaactgcaaccccgatagaaccgccaaatttagcttgcataaccgctgcaagagcacctgtttcttcgtggcgaacttgcaagaaacggatatctttgtcttcagccaaagcgtccatcaatgagctaagtgttccagatgggataccgtagatcgtatctacgccccatgttttcaatacgttgagcattgctgcagatgcagtaatttttccttgagtcattttaactctcctttaaaatctattttgatcctttaaaaatgcagcatagcgcttctacttcatctttgcgatcatctcgccttgaaaatgagttttttcagacttttctcatgaaaacgatttacaaaacgattacagtattaatttatcacaaagagatacacatgtataaagatctgctcagagatgctcaatccctattccataacagatggctattttgagaatttttcacaaactatcctacaataggatagtttgctatcattttaatcccacctgtttccttttcgctctagtaacaagataaagaagtgatacagtatgctgtaccacttcttattttctttaatcaattttcgcaacattgagaagcagcgagctagtcaaaacagacaaagaactaagggccatagcaagacctgctagttctggattgagggtcaatcccagtcctacaaagactccagcagcaattggaatcccaaggatattgtagatagaggcccagaagagattgagtaaaatcctgcggaaggtcttttgactcatgtcaaaggcgcgcacaacaccaagcaaatcattttgcgtgagcacgatgccaccggactcgatcgcaatatccgttccagatcccatagcgatccccacatccgcgatcgagagagctggagcatcattgatcccatctccaacaaaggctaccttactactttcttgcagtttttggatggcgctggctttttcttgaggaaggacatcagcaatcacggtgtcaattcccacttgcttagcaatagcttgggccacccgttcattatcccctgttaacatgaccgttttcaagccccgttctttgagctttttgatcgcttcttttgagctggccttcggagcatcttgaatggcaatcaagccaatcacttgcccatccacagacaaactgatcactgttttggcctgctcttgcaactctaccatccgtttttcaagctccggatccatcgctgtcccgtcatgaagtttgccatttcccaaggtcaccaactgctggtcgatctgaccttggaccccttttccttcaatcgcttggaagttttccacaggggttagcaccaaacctttttcttctgctcgtgataaaaccgcttgcgctaggggatgttctgaaaaagtttcaagactagcagccagtgtcaagacacgcgcttcatctcctacaacatcggttacaagtggttggccaatggtaatagtccctgtcttatcaaacacaacggtttgaatcttttgcacttcttgaagaactgttccatttttaatcagaacccccatcttggcactacggccggttccgaccatcagagctgttggggttgctaaaccaagggcacaaggacaggcaataatgaggacagagactgcgtagagcatggcctcttgaagcgacgcacccagaagcacggaccaaacccagaaagtcgcaatggccaaaatcgtcaccactggaacaaagatacctgaaatcttatccgtcaaatcttgaatgggagcacgactggattgggccattttgacaaagtccacaatttgagataagagggtctcactaccgactttttcagccttaaagagaatggtcccattgctgttgatagtggagccgataactgcatcaccaactgatttttccacaggcaagctttcacctgtcaccatcgactcatcaatggtcgtacttccttctacaatcgtcccatcaaccgcaatcttttccccaggacggacccgaatcaagtcaccaatttggatatcttccgccgccacctcgacatagttcccatcacggagaacttgagccgtttttgcctgcaaatccaacaacttttccacagcctcggaggcattgttacgcatccgttcttcaaagatttgccctaagaggataaagaagatgataaaacccgcagcctcaaagtatactggctgaccagtaaaaagggcaaatacactatagacataggctaccagggttccaagagctaccaaggtatccatattggaatggtgcttcttaaatgaggcccaggcactcttgataaaaggtactcctgctaccaacatgatcggcgttgtcgctagaaaagtcccccagcgactgactggatgggagacaaatcctgcccacatcccaatcatcaagatcaataaaggaagggtaaagatactagtaatccaaaagcgaccccgtaaacttaagacacgacggcgtttttccacaaccgtgtaggaacccttttgcatcttcattccacatgaaaactcaaagtcccctgtttctgtcggggtaaaggatatcaccttatccacaccgacttccaaaggctctaaaatcccctgatcttcaaacaaaatttccttgtaacagccggaaggattgacccgatggaaggtgatttcagcagggatccctttttgaagttgaaatttctttggactatagcctttttctgctgtaatacggatcttttgcactccgttttccacaactgctttttgtttttctaccatacctactcctttattccacaatcatttgaccatgcatcatgttcattccacatgaatacccatattcgcccgctttttctggcgtaatttcaatgacatgtttttcacctaaaggcaaatcttcatgaacgccaaaatctggaaagatcacttgagctagacatgaagatggatccttgcgattaaagatgatccgggctggaacattctttttcaggacaatagtttcaggcgaatagccccccatgacttcgacttcaatttcttgataacctgatttctgacgagcgtggccgcttaccctttcatgctctgcaaagaaccaccaagcaataaaagcaaccaaaagtaaacaaacaatactaatcaacaatccaaacatggaatttccttctttctattacatacaattgcaagggactgtttcgacagcctctgctttcttttcttccaggacctgctgcagctgattaagatctgcaagcgtaaagtcactcgcccgaatcaagttttcaagcacctggacaattctttttgagcaaaccttgtctttcacatcctcaaccaccaagtctaaactttggtcctgcttcaacaaagccgagtagacaaaggctttgccagatttttctctggtcagacagcccttttcaaccaagcgcgtcaagagggtcttgatggtcgacttcgaccagtcaaagcgctcggacaagacggcgatcaaatccgtgctggtctgcttgccttccatccagataatcttcatgatgcgccattctgcattggaaatttgcatggcctctcctttcaaaatctacatttgtaaatcttatgatgttattttactcctaagatttacatttgtcaaccttaaaaaataaaaaaatttcctcttggaaataggggaaggtagacaatctgtttttacaaaaaatcatctaaagagctctaaaaataaatagaaaaaatttcaattataagaaccatcaaagcatctattgaaactttccgctgtgagaaaagtgcctgaaacaattatgtttcaggcacacgggagttttggaaccttaggtccaaaactaagtcatggaacttctacgaagttcgctgacgtccgtaactcacctaaggaaagtttctaagaggactttatcttcaatctgaaagcttcctttgaagatttgtctgattgggctttttttcgctccctatttttgtctctataacgtctcctgcagagcttgagctaggatgcggtaaccagccacacttagatggaggccatctgtcgtataggcttctgctaactgcccaacttcatccaataaagacgaatacacgtcgacatagctgacctggtggtaggcttgggccaattcttgataggcctgattgagggcctgaattttttcattggtccggacatagaccttttgtttgtagcgctcttcttgactcaccggtaaaaccgagatcaggttgatgtgagttaggggaaaatcccgcataatcgcttgtaagaccgcttctacattgtctaaggtttccttttgaggaatttcttttccgatatcattggtcccgatcaagagaaagatctgatccaccgccgttccaaaaacatggacgtctagatgcttacgaaggagatccgtcttatagcctcgtactcctcgattgaccatgtgtttgggactttgtaatagttcatgaatagggaaatactccacgatggagtctccgataaagatcaaaccaggctccttcagaggggcttgattgagctcccgataggttgttaaaattttctcctgctcctttaaaagccagtcttctaacagttgtaccgccatctacttctttcctttcacttgttcccagagggtcaatcctagatactcttcgatcacctggtagacaccaccttcctgatggctcggtgctaggtgtttggcaacagccttgacagcttcttctgcattggccacagcataggagtgagcagccatttcaagcatttcgatgtcgtttccgctatccccaaaggccatgacctggctagcattaagctgccacatttccattaatttagccaatccccaagccttgtgaatgcctgcttgtaagagatccatgctgccaaaaccgctcgaaaccgccatcagctgatctccaaaagcctgctggacttcttgactcacttgatcaagacgatccaagccaaccaccaagctcattttaagcacctgatcaaatagatctgctgtcaattcagggacaaacttcatccgcttgtacaaggcttcaatcacttccggctgcatgaatttctcaacttctgtaaagactgttccttccttgacaaagccaccattgacagctgacacaaccagctggtctgaaatttccctccccttaaaataagcaagaaccgcctctactagctctcgatcccagaatttcccaagaatcatctggtcatcctcaaaaatccgtgctccattggctacgacgagagtcacccgcttgaccaaaggacccaagagttggcgcatgcgatggatttcatttcccgtcgcaatgacaaagcgaatccctttttgatccaagtggtccaacagcctttccaggcgcggaagatccacctctcctcgctcatctaataaggtcccatccatatctgttgcaatcaacttaatcatacaatctaaccttttccctttcaaagggtgtaaattatctggttccattataccacagatcaagcaagtcaaaaccacccgtgaaaacaggtggcttcctcttgggctgaagcttgctactaaaggacaagggatcttataaatacaagcccttttctacactctcctgaattaactcttccgtcagtttccacaactctttggactcactttttataaattttttcttttctaataccatctctgaacggatatgatcagggttataattgacttctgacacttccaagtgattgatcagtggtaccaatgcatcaatcactcttgcatatcttgcctcaggactctgccctttttcaaactccaaccaagaatttttcatattcacatatgtttcttctggaaggaggctcattgttttttctatagatgctagctctctatcatgagcatgaagctttttttcatcatcaaacacccaagtatctccagcataaatctcacctaaatcatggatcagtaacatagaaatcaccttttccatattcaatttttcaggataataatcttgaagaaccatcgcagctagcgcaccctgccaggaatgctcggcgctattttcaaaccgtccatcaagggttctattaaaccttgttactgactttaatttctcgatttctttaataaattcaactgtctgattcaaatcactcatggcgactccaacctccctattcgaaattacgactatcataccagaaatcctgttttccataaatgaattcccatatttgcaaaaagataatgcccttccttttccaagttcttccttttttctaacaagagcaagaaaaaagctaaccgatcctgaccggttagctcagaaggaagctccattttgacagtggagcttactaaaataggaatcgtttttggcaacacaaaccagtttaggattattcactgctcgttcttcaaattaaagtctctatcaattgaccctcttttaaagcaacgacggttgaacaaatcgcttcaattaacgactgattatgactaataaagactatcgtcatatttgtttcctcttgaactttttgcaaaacttgtatcactttttcctgattcgcatcatctagcgaactcgttatttcatcacaaatcaagcactctggttgtgcgaatattgcccttgcaatggcacacctttgacattgccctccggataattgatgaggatatttttctaaccaatccaattctaactcgagatttgtaaataattcctgtatcattcgaatccgttctgaacgatcctttatttttcgaataaatcttaatggttcttctaagcttttcaatatcgtttgattcggattaaaagataataaactattttggaataaatattgaactcttcgataatagctttgtttttcttgagccaatacttctcttaattcttttccttcaatcagaatatggccttcatatggaataaagccagataaaatccttgcaagagttgttttcccagctcctgaatgtccgatgattcctgttacttcatattttggaatatcaactgtaagatttttaagaatcacattctcatctttataatggcttgttacatgtttcaattggaaaaatgtttcttttttctcattcgataatcgattaaaattgaatttcttatgagaatcttccttctgtgcgactaattccccctcttctaaagtcaacacttttgtacaaaatttataggctaactctcgttgatgagtcaccataatcgttgctgtacgatattgctttgcaagatgaacaattaattgcatcatttccatttgcaatggaacgtctaaagcactaaagggttcatccgcaatgattaatttcggatgattgataaacgccattgcaatcatcactctttgcaacattcctccagataattcatgaggatataattgtaatactttttcttctaattgaaccattttcagtgcttcaattattttttgaggattggcttctagcattatttcttccaactgttgtccaattgtaaataagggatctatgctatgttgtccattttgaaaaatgatgccaatatcttgtcgtaaatagtctcttctctttttactagataaggtcaaccagttttcttctaaaaacttcatttcactcgcattcatcatgaccttttgatgaatattcccaagtaaacattctaaaaaagtcgattttccaataccggactcgccaattatcccgatgacttctccttctttaatagaaaagtctaaatttttgagaattacttcctgtccgtatgaggcgtttaattgtttgacttcaaaaatagtcttttccattagtcttttaccaatttattcgtaacttgatagatatcagacggagatagttcaaaatgatgaatagaattgttcattgctgcatgtaagttgacaaatccaatgtaataaacaactgcttcgtctttcgcatagtcttgaatttttgctacttcactaggtagtttatccgcatcttcttcatgagctaaggcagaaattttttcatctaaccattgatctgaatttttcacataattcaatgccccatcactcgataaagctgcatttaggaagtaataaggatctcccgttgccaatgttaatgaggaagctaatgcaatatcataatctaattgattaaatccatcgacagtttcttgaatatcaattttcaaatcaatccccacttttttcaattgttgttgcaaagctgtagcaattttttcattggctaatctcttataggtttttagaacaatttgtaatggttcattttgtgcattaactagaataccatctgcatttttcgttttatagccggcttcttctaataattttttcgtcatttctggttggtattgtttattagcaaaagtaccacttgaataaatacttgaatctaaaaaggcaccatctgcaggagttacatgaccttttaagaaatcttgtgtcaattcttttttatcaatcgcatataaaatagcttgacgaacttttttatcttgcaatcttgctttattcaattctaaatgataggttcttgtacttgattgattatacacttgtacggaagaatctttctttaatgaatccgctacatcatcatttaaatctactccaccatctacttcttttgatttaatcgctaattccaatgttttttgatccggaattaattgataatgaacttccttaatggaagcattgccaccccaataatgagtcgaagccgttaatgaaatggaatcatttggtttaaattctttcacctcataagggcctgttcctacaattttatccttgcttgttacatctacaatggccgtttttgaatccactaattcatgaataaattgaggacttggtttttcagtatgaactgtaaaagtttgtgaattattcgctgtataagtagctgttttaaaaatttcaccttccttatgattttctcctactcttttcaggctagcaatgactgcatcactattaacaggatttccatttgaaaattttacattttcttttaaatgaatttcccatgtttgatcatcaatcttcttataagaggatgctaaccaaggttctacatgaaagtcatttgttaaacgaaataaggtttcgccaatcccaaaacgaatggtaaaccagccttcccaatcttttgctggatcaatccctgctgtaaattgaggatccccaattttcaaaattgaattttggctacctttttgttgttgagatgttggatgtacaggtgcgcatccaactaatactgctgctgcaatgatgcataacaaattttttaatttcatattttcctctctttcgtctgttgaatccaatgatgaattccgttaaacataataatcgttagcgtaatcgcaagtcctggagcaatcattaaccatggcgcttgttcaaacgataatcttccctcatttaacatagctccccattctggttgagggactttcactcctattcctaaaaaagataaggttgctaaacttaagatcgtacttgaaatattgacgatcatatacgtcactaatggtcgttgaatattttttaaaatcgtcatcagccgataccacaatggagctccttgcatatacatcactgtgacatattctcgaactttaattttacgaatttctcctcttgttaatttggcataataaggtaaataactaatgacaagagcaatgatcccatttcttaaccctccacctaatactccagctaccgtaatagctatgagtaaactaggaatggctaacaaaatatcaatgatactcgttatgattctatcaatccgctcaccaaatatccctgctaatcctcctaaaagaattcctcctaaataagataaaccaacaatgaagagagaagctccaatcgaatatctagctcctacaatcactcgaataaaaatatctcgaccaaaatcatccgtaccaaaccaatgactagcatttggtggacttaacacagcattggcattcatcgtctcatagtttaaaaataatgtactccataatagtaatacaaatactaaaacaatcatgccaattttccattttctcttatttgtcatgacaagtcaccgcctttaatacgggtatctgtcctattttgtattccgtcagaaatttgagtgagcactaaatataaaaagctaatagaaactacaatcatttgtacgagtggatagtctctcaaacgaatactatccattaataacttcccaattcctggccaataaaaaatggtttctactacaacgacacccgccattaaagaaccaaacgataataagataatggtcaccatcgtaggcaatatatttttcaataaatgtcgttgaaagatttttgactcttctattccacggtaataaagcactttaacatattcctgttgtaattcttgttctaacaagaccgaaaattgttgaataaattttgcactcattggaataacaagcgtcataaccggtaatattaaaccactccccccttgtttagctagtaaaggaacccatcttaattgaacgctaaatacatacattaagaaataaccaatcacgaaagacggtaatgacatgttgaaaaatagaatcaattgaaagagtgactttacaatccgattgtgacatcgtacaaaaaatatagacaaggggatggaaattcctagtgaaaccattaatgttatcactgccaattgaaccgtattcataacggctggaatcattaaattcttagtcgggatatctgatattaagctctttccaaaatctccttgaagaaatttaaggagccaatttccatattgtacaagtaagggttgattcagtcccatttcctcacgcatgagtgcaagagcttctgtagagacacgacccgttccaactgacattttgacagaagcaggatcactaggagctatatgaatgagtaaaaatacaaaaaatgaaatggcaacaaaaagtataaatatggttaaaattcttttcattactttaaacaattatttccactccttactttttagcacatagtaagaataaaggtgttggattataaaattcatctttttctagataaatcctttggctaatagatcgatcaatttgcagagagtcaacttcttgatttaataaatattgtacatcccattgaggtcgtacttcactagaaatggataaacttctttgaatcagttcgcattctgttaaagtatcttgacttaaatgatgatgagcatgatgctgtggtaaatgactcgtatccgtcatactagaagcaccataatttccatcaatattaataagtaacccacctttttttaatactcgaagccattcacgataagctttcggaacatctggtaatgtccaagtaacatttcttgcaatcactatatcaaagcttgcatccgcaaatgctagattttgagcatccatagttaaaaattgtgcatcgaacttttcctgtttagcaaaaacagtagctaaatggatcatttcctttgttaaatcaattccgattacttcatgtcccatctgacttaaaattcctgtaaagaatcctgttccacaaccaatatctaaaatttttaacagtttcttttgtggtaaatatttttcaaattctgtaatccatctatcttttaagggactatgaaactctcttgttcgttgttctaaaaaagaagaacttcgatttgtccaataattttcaactcgttcatgcatggtttgttccatggccttcacttatccccctttacgattttgatacaaaacatcggtgttgctccataatttaattgttcttcataatcccacactaaatccccaaaattttcttccgtttctactgagatcccttccagtgaagaaaaatagtctatatcccattgtggtctttgttgataggtcaaaggtaattgctgaacaatccaatccattttttcctcatcaatcccttcaccttgccaataatcttctaacttctcttcaacagctttttggcgttttttttcaaattctttttctaatgattcattttgaagaaacgcataccagtttgcgtcaaaaatcaataaggttccatttggtttcaagacttttaaccactctgaataagcttgttgtggtttttctagattccaagttaaatttcgactaacaatgatatcaaaactttctggtttaaaatctaaattttgggcatccattttcatgagttggatgcttgaatggcctttgccatatttttgaatattctctttggcaacttctagcatgttattggaaacatcaataccagttatagttgtataacctaattcttctaaaataattgtgaaaaacccagggcctgttcctatatctaacactttaacattttggttagctggtaacaatcgttgcaattgttgtttccaactttctctttgagttccttctaattctttttcattcactttagaatagcctgtgtaccgatgattccaatagttttgtatttcttctaacaggttcacatttgttactcccttttcaactcgcttatttaatttctgttacaagtttaccaaagaacgcttgaattaatgttaacaaatcatcacatcgaaaatgatttttttaaggaaacatatgttaacaaaaaagaattccagatgacatccgaaattcttcccccaaaattcatagcttgatgcaatttaagaatctgttgcaattagttggattataacctttcacccttcaccttagaaatgaatccaatctttcatcctttcttttattttatcctatttaagggaaatcccctcctttttggaatacttccatttttctaacaagactacaagggcaattaaaaaagctaaccgatccttaccggttagcttctcttttttacccaacaaaagcccaaataatggcaatcaacactgctggaaggaggttggcgaccttgattcgtttgccccagatgaggttgatcccaacacagagaatgagactggagccaaccagtgagagattcgaaagagcttgtggggtcatgatcggtgcgatcaaatgggccaaaagcgtgatcaagccctgaaggatcatgagtgggactaccgcaaagatcgcaccctttcctttcgaaactgtcaaaactaaaacgatgaccatatccagaatagccttagccaacaaggtcgaagtgtcacctgtcaagccatcctggacagctccgaccaccgccatagctccgatacagatggtcagggccgtggtcataaaggcatcgacaaagctggtatcaccttgattgcccgtcttttccttcagccatgtcccgaggtgctccaagccctcttcaatcttcaaaagctctccaagcaccgtcccaagcactagactcagaatcaacatcatactgccgtgactttccacatgacttccatgcaccaccagcatcttttccaaggtccccgcgatgcccaagacaaagacagcaactcctgtcactttcagaagagtctcatgaaaatcttctgataaacgttgaccaatgagcagtcctaaaagcccaccaaatacgacccctaaggcattatagagggtccctaaaccgatcatttacaaactccttcgttcattttcattctttttcaatttctttcaaagaccagcgtcccttctcttcatactggtcaatcaagtccttggctgtttgcgtgatctcctctggataatgtaggctttctagggtattgaccgcatttttggtcacggctgaccctggcttgatctggtagtcaaagacaatcttgccctccacatagcggctatcaaaatggtaattgtcattgacctcaccagaggctgcgaccagctcaatatcatggctggaaatcatgtagaggcagttttgggtagctaaccagcggacaatcccaagacctgatccgatccgctcgatggtattggtccccttaaagagctcgtcaataaagaagtagtgaaagccaggcttcttcagatgctgaatcatacgtaaaatagctttactttcagtgatgaagtaactatctccaacttcaatgtcatcgctcacatccatagccgttagcacatgaccatagggaagggctaatttttctccataggcaaagcctaacccttgagccagaatggcattgatggcgacagttttcaggtaggtcgatttcccggaggcattgtccccactgatgaccatatttttctgaaaatgcacatcattcgcaatcggattggacagcaagggatggtagagcgtctcaccttcaatcccacccgtctctgtaaagactggctgacagaccacttctagatcccgcttgtggcgcaagaggctaatagcgacttccatctctccaaggagatccagaagtttctgggcctctttttgatgagccttcacctgattgtaaatataaacctgagcgatctgcgggagtaaaaagagaacgttgaggtagaggagaataatttccatctcagaggtccccgttggactctgtaagacactggcaaggatccgcgttttcttaaagggtttgaccgcttgcttcagttcttcttgttgtggcaaggccagatggctcaagcgttctgccgaagcaaagatgcgaaccagatagctgacattgtccaaacgaattttattggaccaattgcgcaaactcgaaaagacaatattaaagaccacactgataaccaagagggtaatggcaccgactggctcaaaggggatggcaaagagacagacaatgggaaggcaggccaaggctagatagaggggcaaacctgcataatgcttgccgggatttgcgacaatgctccgcgccatgttgtggttcttcttgcccagttggttgaaaatgacctggaccttgaggcgcaaatcaggatgctcttcaaagaaggcttctaaatcatgaagctggttctgaggctggaattccagcaggcgcattttttgatagagagcctctgctccaaggctcgattgggtatagttgagctgatcaaagaccgcatccaaagccaaatcatgccaggtctgatcatccacttggctatcgatcgtccttcccttagctggataagtcagactatctatcaaactttcttctgtgtctttcttgcgaaagaaaggcgccccatcccaagccttcttcagcttttgcttgaggcggatggctgtaagaaatttggttgcccaaatcaccactatcaatcctaggatcccaagcgggatccagttcacatttccttccatgctctattcctttccactctgaggccagtccaagtgaacatgttccttcatttctcggtaggccgtgtccactctctccttggtctcctcatccagcttgtcgcggtatttgccaccctggataaaatcttccaaaatataggtctggtacttgtacaagtcatagccttcaggagaataggttcctttcggagtccgactgacccaggttggatgagcagtagccgtcttaatccgtgtcttgcgaccaaccttttcgatggtcacatccatcaagacccctcgctctgtccattgggcagtctccacatcccccatcgtttccagacgctgattggaaaggaaattccccatcgagtagatgatgagcttgttttgaccatctttattgaccacttcagcaggctctacaacatggggatgcccgccaaagacgatatcagctccccaagaaaccatcttgtgatagagctctttttgctcttctgtcggctccaactggtactcgattcccatctgaggcatgacaatagtaatatctgcctcttgctctgccttttggatctccgccttcatccgctcttcatccagatcagacaaaacatctgcttgctcttctggagtaagggtcgtttccattccattaaaaccgtaagcgtaggctagaatagcaatcttgatgccattcacttccttgatcactaagggggcctggcctctcttttcatgcgtgtaaacaccgacaggggtgatgcctgcatcttcaaaggccttggctgtcgaatagaccccttctaggcctgaatccaggatgtggttgtgtcccaaatccatgacatcataaccagcatccttgatggctggtacgacttcgctcggcgcattaaagaggggataacctgacaaatagtaattggggtcaatggttccctcaaaatcgcccaagaccagatccgccttttgtagccagggtttgacatacacataattttcatgaaaatcatagcttccatcttctttttgcgcgctcatataaagcaaatcatggtagagctggtctccattagccatgatccgcgctgtatgaggaatctgatcagccggtgtttttgccttgtacacaacctctggccgttcggttgcggtaatcggaaagccttgaaacttttgcacccacaagatggcattggccacgatgaaaacaacagacaagagcacatagacaaactgttcattggtcagccgaatctttgaaaagagacgatcaaaaacccagtcaaaggctgccgatagctcttttcccatcgttttgatggtccctttcacattctcccacttctctaacattcctaccccttcttcgtatctaatttctccaatgatccgccaacagattgagctgtcattgaaatactttctcttcattgtatcacaaattttaagaggagaaaaaaagttctgcaaaacagaacttttaaatgatttactacttgaaacaatagctacgtcacaccaaaaaatgccagtagatataattgtagacgaagatccaaattggtttccagtaaggtaaaaagttgtaaaaagcatgcaaaatgataaccaatcgtagatccctgtgttttttataaactgctgctatgaacaccccaaaaataaaataatcggtcaacataatcggatctcgaaatcgataaacaaaatgagcagcagaaaacaagaaagcggataacagaatatcgaagtgaaatcgattatttttaaagaaacaattcattaaataggaacgataaaataattcctcactgattggagcgataatgatggatactgcaaaatccaatattattgaaatacccagcccctttaaataaaccgaatccggtagcttgatcagaacagtttctggtgcaaaaacaatctggtcctgaaatgtagttataacccacttcgacaccatactatataaaataaccagaaggaaataaaacagataagaccatttccacttcgagccataaaaacttacgagaatccctttctttttcatccataaaacaagaacaaggatcaacaaaatacgaagagccatttgaatacaaataaagagagaggcactcccattaaataaggttgtaataccaactgccgcgagttctaaaacaaatagatcaaaaaattcaaaaagagtgatcgacaatatagccttcaaaaattttgtcatgtcctcacctcatgcatctaagatgttaaattataaagctttcttaatcccactattttataaagcaatctttattatagcacagctcacctgtcttgagaacacttcatttttgtttcttttatcaaaattatagaatagaaaaaagagtcttcctccccttataatgcagatgaacttttttacataaactatccttagtaaaccgccggaaaacatcattacgattttcaactgatgcaagcatctactgaaactttccgctgtgagaaaagtgcctgaaacagtgatgtttcaggcactcgggagttttgaaactttaggttcaaaactaagtcatggaacttcttggattgctgaaatcatccactggataatttcacctgacgtccgtactcacctaaggaaagtttctaagatgctttttctattatctcaatgcttttaacaaataaccatagccttcttgctccatttcctcttttggaataaagcgtagcgaggccgaattgatacaatagcgaagacctccttggtcttttggtccatcggtgaagacatgtcctagatgggcattgcctgagcgggaacgaacttcgatccgctccattccgtggctatggtcctggtaatagtggaccacatctttggcaatgggacgggagaaacttggccagccacagccagatgcaaacttatccttggcaaaaaagagtggctccccagtcgtaatatccacatagatgccctcttcaaaggtctgatcataggcattgtggaaaggacgttccgtcgcactttcttgagtgacttggtactgttctgctgtcagtttcgcttttaaggtttcttgatctggcttctgataagctgccggatcaatcaagggctgctcagcatctgtcacatcgatatggcaatagcctccaggattcttcttaaggtagtcttggtggtaatcctcagctaggatgtagtgacgcaaaggctctaactcaaccgctattttactgcccagttgcttctcttcttccgcaaacaggtaggcgatcacttcacgatctgcctcgtctaggtaatagacaccggtccgatattggcgtcctcgatcatttccctgcttgttaatagacaagggatcgatcacacggaaatagtagagcagaatcgatcgtagggtaattttatctggatcgtagatgacctgaacggtctctgcgtgatccgtttccttgatcagttggtagttggtcgtttctacctggccattggcatagcctaccgtcgtctcttctacaccggggatccgtgaaaaatattcctctaagccccaaaaacagccacctgctagataaatctctgccatcttttttcctcgcttcctgcattccccacagggaacgcttgacatctattagctccatcataatccaagagcctcagattttcaaggattctgcatcaaaaatcccttctactatatgtaaaagggggtcaatccttcttatttttcaaataagaaaaagagcgagtaataaaagttccaaaacgatagggttaactgatgtagaaaatcatgaaggactaccatgaccaacacctcctctgaatatctgtggacaaactcaaggcacatcaactacaaaaccaccgtcggtccatagacctgtaactgaggcttcacaacctcgtaatgccagtgatcataagctcgccaagcttgaaaggcctcttcgttcaaaactagcccacccagaccaatcaataaactggcggtctgataaaacttttctaactcaatcaacagacgattgtcaacccgcctagcctttcgtaaacctttcaacatctgatctagattttctcgaaatcgaagggcatctggactgggggggaatcctttagaaaaggctgtttgaagaaggatgatcgtcgtccttgcctcttgaatcacgtccctttcttccatataaatcaccttccttttcacctccattgtacacctttttctctctataaaaatggataattcctaaaactaggaacagaatgaggttggtacaaaagtcctagcctctcaattatttttggattgtcgagcaagacgcagtggttgagtgggctctactacgctgatttcatcagcttttacagccctactcaactgtgcggaggtgggacgacgaaattgaattctaacgaattaccgatttctgtcccactctcataaaaaacttccccaagtttccacttgaggaagttcttttcgaaagattagtcaatgtagtgcaatttcccacggaagtcttccaggctttggtagcctttttcttccatgatggctttgagctccgcagtgatgcggtcaaaagctcctactccttctttatggagtgtcgttccaatttgcaccatactagccccacaaagaatatgctcaaaagcatcgcgaccagtcaagacgcccccggtccccacaatctgaatttctggattcagacgttggtaaaaggcatggacattggcgagagccgttggtttgatgtattctccaccaatcccaccaaaaccgttcttaggacgaatcaccacggattcatcctcaatgtagaggccatttccgattgagttgacgcaattgacaaacttgagcgggtatttgttaaagatcgctgctgcttgatcaaaatgaacgatatcaaaataaggtggcaatttgatgcctagaggtttggtgaaataggcaaagacctcagacaagatccgatctgtcgtatcaaaatcataggcgatctgaggtttcccagggacattgggacaagataagttcaactctgtcaagcctttaaagtcactatcttgcacctttttcaagatggtatgagtttcttcaggagacatgccgacgagagataagaagaaggtccgatctggatccgtttcttgcaactccaataagtaattcaaataatagttcaacccttggttaggtagccccatcgaattgatcgaaccaagcggcacatcttggtagcgtggctctggattaccagcacggaattctaaggtcgctgtcttggtcacaaaggttcccgcagctgagttcttcacttcttctaattcctcagttgtcatacaggctacacctgccgcattcatcaagcagttgtcaaattcaaaaccagcaatttgcgtctttgtcgataccatcttgtactccttttttgaaacaccaccaacagaattgttcgggatgctctctattttcttctttcattataccatcacttggaagcttccggacaatcaaagctaaaaattcttccaaatattcggactttcctagtcacgataaaattttcagaaaattcaacttttttctttacaagccaaaaaaagtctgctataatgatccatgtaataaaacatgacattgtttgtcaactgtctcaaagccactcccctagcgggtttgctggttttcgtttcattcacaaaggagaattaacatgacaactgctaaagaatatatccaaagcactttcgaaactgtaaaagctcgtaacggccacgaagctgaattccttcaagctgttgaagagttcctcagcactttggaacctgtttttgaaaaacatcctgaatacatcgaagaaaacattttggctcgtattacagaacctgaacgcgtgatttccttccgtgttccttgggttgaccgtgaaggaaacatccaagtaaaccgtggttaccgtgttcaattcaactctgctgtaggtccttacaaaggtggtcttcgtttccacccaactgttaaccaagggatcttgaaattcctcggtttcgaacaaatcttcaaaaacgtcttgactggtcttcctatcggtggtggtaaaggtggatctgacttcgatcctaaaggaaaaacagacgctgaagtaatgcgtttctgccaaagcttcatgactgaattgcaaaaacacatcggtccttctcttgatgttccagctggtgatatcggggttggtggacgtgaaatcggatacctttatggtcaatacaaacgccttcgccaatttgatgctggtgtcttgactggtaaacctcttggtttcggtggtagcttgatccgtccagaagcaactggttacggtttggtttactacactgaagaaatgctcaaggccaacggcgacagctttgctggtaagaaagtcgtgatctcaggttctggtaacgttgctcaatacgctcttcaaaaagcaactgaacttggtgcaactgttatctctgtatctgactcaaacggttacgtgatcgacgaaaacggtattgacttcgaccttcttacagacgtcaaagaaaaacgtcgtgcacgtttgactgaatacgctgctgaaaaaccaactgctacttactacgaaggttctgtatggacttatgctggtaactatgacatcgctcttccatgtgcaactcaaaacgaaatcgatggcgatgctgcaaaacgtttggtcgctcaaggtgtgaaagttgtctctgaaggagcaaacatgccaagtaacatcgatgccatcaacgtatacaaagaaaatggtatcctttacggacctgctaaagcagccaatgctggtggggttgctgtatctgctcttgaaatgagccaaaacagccaacgtctttcatggacacgcgaagaagtggacggacgtttgaaagacatcatgaccaacatcttcaacactgctaaaacaactgcagaaacttacggtcttggtaaagattaccttgcaggtgccaacatcgctgcctttgaaaatgtcgcaaatgcgatgattgcacaaggtcttgtataatcaatcgatatttttctttgagaccttcgggtcaaagcctctcaactcctgaaaccagtatgtttcaggagttttttttgtagttacagacctctgtcaagacaccccgtcccaagtgaggaaagccattttttagataagggactcgaccgtctctagtggggagaagtgatccctctctttttctgtatctttttctaaaaaaattttattttttttactttacccccttgcatttttaataaattagtattaaactatagcaaaaggaggtgtgcttatgtttcttttagctcaagaaaaatcagatacgatcgaattccttaagtctgaattggtccaattactctacaatatgcgacaagaaatcgcagctagccgtcaatcacagaccggcgcagcttgtcatcatattgaatattgcatggacaagatccaaagggcaaaaagttccgtagccattgccctcccgatcgaatccttaaatcttgaaatcacgactatgttgcgccagcaactcatcgtcttgccaccagaggctcgaaaaaattgggaccagattaaaaagctggatttcaaatactgccacttaaaatagaccaaaaaagagagtgggacagaaatcggtaattcgttagaattcgatttcgtcgtcccacctccgcacagttgagtagggctgtaaaagctgatgaaatcagcgtagtagagcccactcaaccactgcgtcttgctcgacaatccaaaaataattgagaggctaggacttttgtcccagcctcttttttgtgttaaacaaagtataaatttctaattatctttttatattttcttaaatgctcgtaaagccttattctatgtgctttcgagtatttttactgtaggaagatacttcacgtttctttgcatatttcctcatgtcttagctgtcagaagtggtaaataagtagtaaattcatttgtactactaagcaacaagacgctcctgttgcttctctttattcaagcgtttcatttctgccattgcagaatcgaatgttgcatgtgcgtaatagttcagcgtcatggctatattagcatgtcccataatgtactgtaatgcctttggattcattcctgcatttgcatagttggtacagaatgtatgtcgcaaactatgtggagtgatgtgtggcaatttatcctcgttatacttattgtatttcttaacaagacctttcatcatgccgttgtaatcacttgccacttttggatagttctttctattaagaaagaggaaatcactatatccatcaatctcaacacgcttatcattctttcgattcgctaacactcgcttaaatgcttgataggcttcttcaaccataggaacttgacgttcgccacttttggtctttggtgtttcaatgtagtacccaatttcagtatctctcaatagctgatggtctatattgacaagacgattctcaaaatctaaatctggaagtgtcaaaccaccaaactctgaaatacgaagacctgtttttaagagtatcagaatttcatcataatttttgctgtaggttttatcagcttttgcaaaggctaacagtttttcttcctgttcttctgttagtacggtcttagggacagtatcatcatcaagaactgctttcagttgaaagtcaaatggattcttccgaacacaatcatcttgtatagcaatatagaatgaagcctttaaagaacgtttgtagttattgatggtttgataagcataaccattttcactcattctaatagcccattctttagcgtctgatggcttaatactgtcaatacttcttacacctaacttgtctttcttcaaaatatccataagatatttgcgtccagtttcagtgttttttctaacctttggtctttgagcgttctgttttgcgtaaagctggcagagtgtcattttctttcctacaacatcaataccatcatgaatgtctttctgtaactctgcgattttctctctaagtgagatacaatcacgctttcctgctggtactcggtctgtagccacaagtttccacgagtaaacaaattgcggttctccaaatgaatctatatatttgtataagtatcttccgtcttttcgttggctctctccagtctttaagattcgacctttattgtcacgtcttttttctgacatggcatttgctcctttcctttatggaaagagccttgatacgacttaatactattttatcatatacaagaccctttggcgacgctagattgcgtccaatgtatctataattttttcaaattgttttcgtttaatctgaatacgattgccattcataatcagccaatttgcatttttattttcctctgccaagcgtcgtagcttgttttcgccaatacgaaaatattttgacgcttcttcaatggttagggtataacgttcccaaataggaatgtcagtctgcttcataaaatcctcctttccaaatcacttatttggatttcataaaagttgttttaccagcaatcgaacagctttagcaaagctcacgggagttccacccctgcatggttctcatgtagccatactcattgcctgcgacggttttatcacgctcggactattgactgtatgggagtatcattatcacgataagaatgtcgttgcaggcaatcctgctaaagattgcttctcggatcactaacatgaatcgctcgctatctttataagataggtcatggcggttagttccgttggctcttttcttatcgaaacgtattcgattacttttattcagttttcaaagaacaatggctcgttagcctatcaaaacacattgaaagctcaatatgctttggtggaataacaaacctccctgttcgggaagcgtggaatggtttagcacgcttccacgaaaggagagaggatattacttaatttcaaatgacaaaatctttgtaatcagtctggtttccattcttccacgtaagacttcatcaacgaccatactttgattgccatattcatctttcataagtcgtagggaacgcttcgttatgtaccctctgtaatgatgtagaatctggttaatcgcttcggtatcgccatctgttgcctttacaatgagaggaaagggaatcataggatattgtgttttcattcttcaaattcctccataaactttttaattaaggctagtccactggttctatgccgatagacagtagaacggttcaatttcaacaggtctgcaatttctgaatcgctcatgtccataaagtaaaacagcagtagaatttcacgtttcttgtctggcaactcacgtaatgcttcactcaacaaatcattttcaacgcctactgataacccattgagtgtaaaaatctgaaagtcagttgaatagttatctgttgtcgcaaactggctaacaagataatcgccaacatccgaaaaggacacctcacgctttgcaatccttgaaagataaagcatataattctttcgctcgtcttccatagcacgtttacagatatagtcaaactgattttctattgtggtctgaaaagaagatggtttcatgtttctcaccccctttctgtctaggaaaggaagtgagccttgctcgtttatctcctttcactcttagtcccaatgtgaaagggggatttgttgcattactgataaataaactttgtaaaaaagttctgaatagccaaaaaagcatataaacagatttatttctctgtttacatgcttctgttattctatctatatgatttataaaaccacattggtggacgtacttatctattgcagatagacgactttttttgacaagaacccaatgtaaggaaatttattgtatatgatgtacttcatggcgacgttgacctccaacaaaccgccatttggaagtaatatacaatattttaacagcgtaaatagcactaccatataacggttttttttattggcgtttagtagtgctttttattaaatataaacctataaaccatataacacgtttttctatacctgtttttaattcagtaggaacaataaaatgtatagaggtggtctactatgcgtaaaaaagaagataaatatgattttagagcctttggtttagccattaaagaagctcgattgaaacgaggtttaactcgtgaacaagtgggagcattgattgaaattgacccacggtacttaactaatattgaaaataaagggcaacaccccagcatacaagttctttatgaccttgtatcgttacttcatgtttccgttgatgaatttttcttacctggggtcccgagcgcttagtgggaatttgtatcgataaggggtacaaattcccactaaaccaatgtttcaaggcctatttattttttatattcaattctcttaagtgtttaggaatagataacaagtcaaatttatactctccaagaaaagtgatatgctcccaattaataggagatacatgcttcatatacttagttacttcgggatctattttgacgagataattataagctgcttgtaagtagacggcgttccatatacttattgcatttattaacacattaagcgcactagcactttgaagttgtcggcgaatatcgcgctccataaattttccgcgtcgcccaaaaaatagttctctagctaaagcattaatcgcttctgtcttatttagtccatgagtgatccttcgccgtagctcactatctgtaatataatctatcataaaaatgctcttttcaatgcgacctagttctctcagtgcaagagctactctattcttacgtgcgtatgagcctagctttcctaatagtaaagaactagatacttttcctgtttgaatcgaataggcgattcgtttaatttcatcatagttttcttcaataatttttacattgatttttccgcttatatcttctgataagttagggtagtaggaaggtgatttgatagaaaataattgtgatttttttatatttctgatgcgaggttcaaaatcaaagcctagtaatgcggtcattccaaacacctgatcagaatacccatttgtatcagtaaaatgttcctcaatatctagatctgtttcatgataaagtaggccatcaagggtatgagtagcttcccttgtattagttgaagcaacctcgatatgatgagtcgtatgcctatcatttattgatcgaatcattgtagctcctttttccatacttttgtaatgtggattaacatcggattttagagctgagacgcccactgggacgcgcattccgtctgaagcagtggtttttccttcaccccaaaagtctgcaacaggaagctttaactgataattaaccaaaacagattgagcacgagtcagagcttctttataaaagcgccattgtttggcattggctaactgagaataagaaattccaggagttgattgggccattttttcaagaccaatattcatccctaaacccagcaaagcagcaaaaataatttttctttcttgttcactcggcggtttccctgtagaatcatgactaaattcttgtgaaaagttggtccaactgtccacctcaattaaaagatcactaagccttatcttaggaattattgaataaagtttttttctatatatttctgcttcgctaggtgtaactttttccaactttttaaggtttgctcttgaaattctcttatcaactgtcgaataaaattgaagctgtaaatctaaaattatttcccgatcctttaaatagtcctcaaacgtgtctggaatagtttctgaatcaatacaagcagataaatcaactaagtaatcatcaatatttcgatggatcatacttccttcaactgaaatatctcctgatcgaatattgttctttagctcggtgaaagctactaactcatagtaagaccgatctattttcccctcttctggccgaacaaggcttttccattttttactcacaaaatcagtagaagtatctgccggtatttttcttttaccactattgtgtaaatcagttagttgagttagggccatgaggactggatttgctgccggagttgctttgaacgaaagggtcctcaataacattggcgtgtatcttcggaggtaattagctttatttcgaaccatttctaaatagccatgatttttattacctgtaatttttttagcttcttctccatcttgtactaaatcttcccaaggcatgattcgttcaatttcgtcaaaaggattactatcattatcttttgcaaagtgaagagcatcaattaaagaagcataatgttccaattttttagtagccaattttcctttttcttttaactgttcttgtgaatcacgtgtccctttgcgtttaatacttgctaaaatgcggtcattaatctcaatcagttgatcgatcagatattgatgatgattgactaaaaaagcaataagtaaagagtatcttttttcaagctcaaaacgggagaagtcatatgcatcataattttcccctagtctagctagctgaagaaacctgttccgattaatatgggagacattaattgtcccgagtcccatggaagcaatcacttccacttttttacaaatactcataaagctttctggatttgccttacctggaatgtcttttagccaagcgagtttagttattttcgtctcttcataaatttgaaacaaactctctagtttttcaatttgtatatctgttaatgaacagagtaatattgaaaataagttgttttctgctttatctcgacagcggcttataatgtcttcaagtgtagctatagatggaaaaataattctttttcgagttaagaaatcaattgtttttttcattagatagatagagtcatcattttctaaagctagttcaattaaatattctattaactgtttttgtgtattagcactaccgaatcgatgatagttgaatacttctaagatctcgttgaagtgatttgcacgtgtatttctatgatcatatgaatttaaatcaattgcatcaagatggagctgtcgactcacataagaagttagtctggttgatttaatcggccaattacttaaagaacacccaggataccgggccaaacaaagttgtatcgcaaatcctagtttattgacctttccacggtgttgattaataacctccagatcataatcagaaaaactaaaatacgctttaaaatcctcttctgataagtggtctacagaaagaagttgttcacgctgtgaagtagttaaaattcttttcatagccatatcttaagcattccttttattgaggtaacggtaaaaggttgttttgcttaatttagaggcatcaagaatttgacgaatagaatactctttgctgtcatacatttttaaagctaaatcaattgatagcttacctttacttggacggccccctttttttcctcggactctggctgccttaagaccagagttagttcgttcaataataatatcccgttccagttctgctaaactagccataactcggaaaaagaatcttcccatagacgttgaagtatctacgttatcttgaatagatataaaaatgacactaagttcttcaaataattcagaaagttcaatcaaatgtttagttgatcgtgaaattcgatctaacttgtaaatgacaacagaatctccttcacgtagtaggttgatcatttcttctaattgcggtcggtcttttttcgcaccagttactttttcttgaaataatttatcaattccataatgagtaagtgcatcaatttgtaaactaagattttgatcatccgtactcactcgagcatagccaaaaatcataaaaaaacctccttaattttataatttaaatgtaccataactcattaagtataactatataggaactatgaaaaaggaacggattttggtacttgatttacttaaaaaacatttagaaaaagcaggaaaatgaaaaggtaccataaacggtcgtttatggtaccattcaaatttatccttattgtacaaaataacagcgaaatttttaaatctattccttatcgatacaaattccccgtaggcgctagggacctctttagctccttggaagctgtcagtagtatacctaataatttatctacattccctttagtaacgtgtaactttccaaatttacaaaagcgactcatagaattatttcctcccgttaaataatagataactattaaaaatagacaatacttgctcataagtaacggtacttaaattgtttactttggcgtgtttcattgcttgatgaaactgatttttagtaaacagttgacgatattctcgattgacccattttgaaacaaagtacgtatatagcttccaatatttatctggaacatctgtggtatggcgggtaagttttattaagacactgtttacttttggtttaggatgaaagcattccgctggcagcttaagcaattgctgaatcgagacttgagtgtgcaagagcaaccctagtgttcggtgaatatccaaggtacgcttgtagaatccttcttcaacaatcagatagatgtcagacgcatggctttcaaaaaccacttttttaataatttgtgtgcttaaatggtaaggaatattcccaacaattttatacctctgtttgttagggaattgaaactgtagaatatcttggtgaattaaagtgacacgaatgttcagttttaatttttctgacgataagttgaatagatgactgtctaattcaatagacgttacctgtttacttattttagccagtttcgtcgttaaatgccctttacctgttccaatttcgtaaacggtatcggtttcttttaaattcaattgttttattatttggttgagtactttttcactcgttaaaaagttttgagaatattttatatttttgttcatgtaatcactcctgaagtgattacatctataaataaatacagaagttaaacgatttgtttgtaattttagttatctgtttaaaaagtcataagattagtcactggtaggaattaatctaacgtatttatttatctgcgtaatcactgtttttagtctgtttcaaaacagtagatgttttatctacattacgcatttggaataccaacatgacgaatccctccttcttaattacaaatttttagcatctaatttaacttcaattcctattatacaaaattttaagataatgcacaatcaacacactcttaagtttgcttctaagtcttatttccataactttagggttaaccatacgcaagaccaatcactctcggacaatactcatgattttaatgataaaatccatgttaaacccatagataagaaatacacctgcaataaccgttacctgtttgtgccaatttaaaaatgcaccacttttttataattaaaacggttgaaaactgtaccactaataactcacaatagagagatgtcaccgtcaagttaaatgtacaaaataacagcgaaatttttaaatctatttcttatcgatacaaattcctcgtaggcgctcgggacccctacctgctaataacttggtaaaaagcacccgacgattacagatagagaaatacatggatagctttacagacaaagaactatccttaatggaatctttagccagcggtatcaacgaagcaagaaacatcgaagactaattaaaagaatccatacataacggaaagagccgataaaatgagattgtattaatctcattttatcggctctgcgtctttgcgtctggctctgtaatcacagttactttgaactgctttatttcaattaaattttcttgtctgcatttcggacaatagagggggaatttttttaattcagtatcttcccttatctttaatcgtgttttatttccacatacaggacacaatatccacttgtagtttataataactatctcctcctttacactttaattcaaatctttattaaaaaatatttcatcttatttaacaagaaaccatatttatataacaacataaaatacactaagttattttattgaacatatatcgtactttatctatccgactatttggacgacggggctggcaaacaggttcaccggtagtaacatggtacccttttaactctgttaaacaaacactacgtccatttgtaaagaaagttaaatcactacgatattcttgaatacaccgagcagggatttctccactaagaatgacctcattatttttcaattgagtgtctacgatgttcgcacaatatttaggagcatcgttgtatgctcgtgaaagatattcctgtggcgcataaattttaaaactaagatatggctctaacaattctgttccagctttttttaagacttgttccaatacaataggagcaagcatccgaaaatctgctggagtactaacagggctatagtataaaccgtacttaaaacagattttacaatccgtcacattccaaccatataatccttgttcgcaaccatagcgtatcccttccataactgcattttgaaatgattgatttaagtatccaagagaaaccgagctctcatactgcattccacttcccaacggaagcggtgatacagataaaccaatggaagcccagaaaggatttggcggcacttcgatgtgaatggtatattctgcattttttaacggtctctccatataaatgactgtaggctcttttagttctatctccacatgatacttttcttgcaacagtgcactaatcacttccatttgtactttccctaagaaagaaagtataatttcatgtgtcgtagaatccacgtaatatcgtagaagcggatcactatctgagatttccaaaagggcatcaagcaacatttctctctgttcaggtttactcggttcaacagttgtttgtagtagagggtgcggattttcaatcttttttctctgtggcaatagttttgtatctccaagaacactatttaacttcaaaaactcattttgcaaaataacaatttctccagaataagctctatcaatcttacataattcaccatttattgaagtatacatttctgtaacttttattttttctttttctgatactctaaccgaatctcgtaaatgtagtactccactataaaggcgtatatatgcaagacgttgtcttttttttgtatattcaattttgaaaacatttccgcaaagttcagacggacctcgatgtgttgatgaataaaatttattagtaataacttctataaggttatcaatccctatattactttttgcacttccatgataaagagggaacagagaacaattctgaaatcttatgctttcctcttgttcgagttccaatgcttctaatgatttaccggacatatatttctctaaaaggtcatcgtttccctctattaccgtatcccattgttcagattcggtaaagttcgtcacacacatattaggatacagttctaccttctgtttgattacaatttcggcagaaagtttctctttaatatcctgataaaccgttgataaatcaattccattttggtcaatcttattgataaaaaagattgtgggaatccccattttcctaagtgcatgaaataatatacgagtttgtgcttgtacgccatcttttgcagaaatcagtagaattgccccatctaaaactgataatgaacgatatacttctgctaagaaatccatatgtcctggcgtgtctatgatgttcaccttcgtattttcccactgaaaagaggttattcctgtctgaattgtaattcctctctgacgttctaaaagcgtattatccgtcctcgttgtacctttgtccacgcttcctaattctgtaatcgctccactgttatataataagctttctgttaaggtagtttttcctgcatcaacatgagctaaaactccaatattaataattttcatgtgattttcctccattcaaaaacccaaaagggcataaaaatcccagtgataaatacttttatcactgggatttttatgcataaccataggtatacaaagcatacagatattctctggatactttagaatcacatgataaaggtattcttaaactgggtacaaaaaactaagccctcctaaaaaaggacatccaattatttgttcccactatcaaattgacagtttatttaagaataccttgccgcatatttattaactccttttaaatagatacttaaataatagcacgtaagagcatatttgtaaaggaatctccaattttttatcaaagagagtacgtgattacaaaatagctgtaataatgtaccaatatttgttattctataatcttccaattactcccgttcttttcaagtaccaaatcaaattgagatacctgcgttgctttggtctgctggtcgatatactccactgtcagcgataccgtgacttgattatccttacgattgtgaataggatttaccagttcttgaaagatgtactcttttccgattggttttaatatcccgtcattcacatagtaggaaagttcactggctgtcgctgtaggatagagcttgaagaacgtcgttaaaaactcattgatttcattggttgtaatggaatcaaccgtcccctcactttcaatggcttttggtttataacttgatttcttaggtatgttggtaatggtcggattcttaaccagtaccatatttccagaaccatctacatagacactcactatataagcagagtggacggtctttgtattttctccctctgtaatgagctggtctacactgtaggttacattaaactcattgtcgccagttggctctaccgtccatatctgaaatcctcttacagaagacgatacaggaatatctttgcgtactgtatcaacattgagagcttgaagttcatctgtcagatagccttttagactttccattcgattatcaatggacttatcggattgctcccatgaatagtagactttcgcaaagttctctacaaaattttctacatgatgagtatcaacgtattccttttctatgatagttgtttcgtgaatagtatgagtatctatagctgtaaagtgcttgaatatcgcaaagctgaaactaagccctaaaagtacccacaaggcaatcacaacctttttatgaggattgaccttatagtagacacgaggtttcttttcctttggtatctgtttttctttattctgattttttctaaatttcatcattaaatcttcctttctcattgtttgattcgtcctgctcccactaaatgctgttgccagtaggggcttgttaagtcggcataaccgattgggtcgcctgcatgaaacatacggttattgccaaggtatatcccaacatgagtaatataagagccagcgttataggtagaatgaaagaaaaccaaatcgccagcttgtgcttccgatagtgggatatgctgggtcacatcatattgctgttgtgcggttcgtggtaagttaattccagcttttccatacgtccattgtgtcagtccgctacaatcaaaagaagtagtcggggaagctccaccgtaaacgtatcgccagccctcatatttcagtgcttcgtccatgatggcttgtaccgtatcatcatcaaactctgttgtgacaagatactgcgttaccagttgcacataaaacatattgccatagttgtatcgccagcccccattgataggtatggctatgggattggggtaagacactttttcgccacctgaatactcttttgagaaactttgagccagttcaaaggtatatttatttccacgattagccacataccctaagaaaccaccaccataattgtaggactggataaccgattctaaatctacactgagcctttcgctactggctaataattcactgaaatacttcacaccttgcttaatggattcttctgtactcaatgaattaggtggaagaccgagggattccgaggactgcataacatcttccgcagtaccgcccgattccacctgtataatcgcaagaagtatgttgacatattcttcaacgccatattctttggcatatttttctaccataggcttatgagccagcacttctgcggaaacattcacacctccataatgaatattggaaattccgctgtcctgttcatctgaaaataaaatggcaacaaacagaagcagtgagaagaccatcaagaataatccagaaccaccaatcactaaagttttcaacttcatggtttcttaccgactttcttaatggtggcggttttgattggtggtctacttcttgtattttgtagtggtactctttgaacagtagacggacgttcttttgtgattggacgttgtgaagttctatctgctgtagtggttgaagttgctggcttttgaacggttttttcttgaacggtattgccttggcgttccacttttggacttgaaaaatcggacttaactgctggacgctcttgtttggcttgttgagattccttatatgaagtctgaatattagactgttttgaggtctgttcatcatgatattgttcttgtcttgtagtcggtctttcatgaacagaagaagcaggctgttttttctgtttgacctgttccatttcagagcgacgcttcgcaatggtttttcgcctttgttcctgctgttccttgcgtccactggctctgtccgctttggtttgagaaatactactggttaaatcacggacattctcttttactttggattttccttgatatactgcatatcttgcattggtcggcaaatctttaacctgttctttcaaaccactagcagtgtctaccattctgtctttggtatcagctactgtaccgatggtttgaccgatacgttttccaagtgttgatttttcctttccgtctggtcgggagtgatctgcttgtgtccttgcagaactccccgaacccgactgtccttttttacctgtaacaatggcagacccagcccctagagtagtcatggaacgtccaagtttccgctgtagacggtgcatgtgagcgtgcataagcatacgaggttttctcatcacacgacttcccacactttgagaatcgttactctgtagagaaaacatactcattaaatcgcccagcttgaagtagattcctgcaaaggtcacaatctgtagaaaagcaatcaaaaagaacggataaccagccgataaggtatagagcatggttgaaatactaaatgctgtcgtaataatcaatgtgattccagctcgtgtcaaaatggtattaaagagctttgttatggctcgttttgacataccatcaaatgatggaatcatgcttaaaataaagctcacaggcagaaacatagcatagatgataaaaagtacctgcgagaaaatcatgattcctgttaataggaatacaaatatggaaatcccaatattgaagacaaataggaagaagactgtacctaaacggttaatggtctttgtaatggttagattggtattgcttctgtcttcaatttcttccgcaacaattttttctctgtcttcgccattgttggaatctgggctggtggagagcaggctttccacacggtcaataccgatactttcaatgtctgaactgttgtattgaagcagtagccacggttgctgaacctgtatggaaaacaggctatctctgattaagtccacgctgtccttgccttgactatcggaatggggcatgacaatcttcgtgccaagtgataaactggcattactgatgtctgatgaaaagtcattgatttttttaatgtagtcgggagcgtaggcaataaaggaagccgataggataaacaccagcacaaaattcataatggcatgaattgcctttgtggtttctctctttatcagtcccgtataggcaacataaaccccaagaaccaaaatcaagagtaagaggaatccaacatagaaaccctctgttgaaaatccgtttgcactcacaccagctaaggtctgcatattcttaccaatggaatctgctgtagcggaaatgaagtctaaggaataggcttcctgtactaagtaacctgtcgcattggaaacatacaaactgattgtccaaataaaattggtaatggcatatagtccatacatgacctgttttccaatcccgtccgaccagttccacggaagccagccccagctattatccacataaaaatccagttgatagttttcaagtgggtatcggctgtattcatttgccacattgaccgtatcatctaccaagcccgcagcttgaaccaccgttcccagcatggctaaaagaaaaatggcaatcacaagtgtgaaagccactgtcattgccactttacctagacgtttcagcgtccagtttgattttattctgtttactattgatggtttcacatttacacctcttttcgcacaggtggtctggtatcaaaggcatggagcagttcttcaaatacagggtggaactgtatcacaccgacacgaccatataaatcactgataaggcattgcccgttttccaaatcacgcaatcgcttctgattgttttcgtcctctgggtctacaccaaaaaaggctaaggtctttttaatctcgttaaggtcagtggaacgaaatgcaaattttaagccgaggttatttttcagtttttcatctaagaggtcgtctgtattttgggtcacgaaatataccccagcgttcatagcacgaccagcccgaaccagcttcatagatagtgtttttccttgtgctacctgtaaaaagctccatgcttcgtctaaatctacaatcttgaaaatgcttcggtctgtatggataaagtctaaagcaaaggtactaatgacaatcagcatagcaacggataaaagctccatagtggtatattcctcaaaggaagtttccttgtcgggaagtaccaagtccgcaacctgtataatgttcagttgtttttctaagctgatagactgctccacataaccattactgaataataaatgtgcaaagtcatagtctgtaaaactttcgatatggtcggctatactggtacttagtggcgtattctcaacccgtaattcctcaatcactttcatcaaccctcgtacttcactattggttactgcacgaatggcttttctaaggattgggaagcgttccccatcacgagaggaaatccccgtaaggaatgtcagaatatcaatagccagtgattcagaatctttgggatttttcataatcacataagggtcaagtaagcctttgtttttctcatcagaagtcagagtgacgatattgatttcatgggaaatctctggcaaggtttctttccatctgccacgttctgcttttgggtctacaatcactgcttgtgccccataaagcaccgcataatagacgataaggttattcgcaaaggatttaccaccacccagcgaaccaacaaaagccgacgctaacgcattggttactgaacccttaaccccttgactggcaagagcaggtttcagatagacattgcgtccagtatctaagctgtagccaacataaatcccctcattttcccccagcatttgagtagcaccaaaacctaaaccagcgaggaaatcagaggtcacgtattgaatataatcattcatataacgcttgctggcaggtaaaaattcttcatgtaagccgagcatatccccaaatggtcgtaccagttttacgcttaaatcgtcataaaaatctttcacttcattacaacgacgtttgagttcgtcaagatcatttgctgatacccttaccacataagacagcttgtacatagattccttgctttggtctaaattggtttccagctcattcacactttccagagcttccgccacattggagctggtttcattatcactttgccaagcgtggttatccaagtctttcagttctttctttttattgcggacagtagatagggctttacgattcgctacaatttccacattcattgacgtatcaatcgggaatgtaaattgctgttgctggtagtagaagatttcagaggacgggaagtccagttctccgacaatgctgttaatggtaaagtaagctacatagacggtttcatcttcctgctggattttcaaatatcgctgtttttcttccaccaaacagcgagtaggcttaatcaagtcatagtatttaatcagcgtttcattatccagctttttctttgatagatggtactcatactcttcataggcagtgcctgtctgtccgtaaaggtgttcaatcagatagccgaagtcgtccttatctaacctgcggattttgaaacgacgagagattttattttctaagagcttttccatcttctgaaaacgcaggatttcatcattactcatactaacaaaatcgcccatcagcttatggttcacatcatagacaaaatcagacaaagcattttttgcttcaacggtaagacttttcatagaaaactcctgatcgttgagaagcaacttaaagccgataaagaaacggtagttcacttgattttcgccaatcatggatattaaagcgtctgtctgttggtcgattttgtcataggcaaccgctttgagcttgccagtgacttcatttttggaacgctcttgtgcagaacgtatgctggattctgtactgatttgtaaagcatgaattttgccatcacgattttgtgcgataagctgtctgaaagaatcatgcacttgtattttctgttctggacttagaaatgagtaattgtaaggaacaagctcatagtaagcataacattccccgtctttattccagacgagattgttttcaatgtatttaattggatatgccataaaattcactcctaactgctgtaatggcttcttgtggctggtttctgccaagcgttactttttttcctgcataggtcagctttggtcgcagtgcataagcaatgacagacttcaaaaatccataaggctttttaccatcaaaagtttttgtagacataaaccatgtgaaagccacaggaatcccaaagtatttgagaaatgctccctctatcatggaaagagggggcaagttgccaagtatcatcactgcaaagagtgacacgacaaaccatgtcatttgcgtaaaggttatgggaaacggaagtctaaaatcattgatagaatacagtaccttttccacagaccagatactggtatagcttcgtattttcttcatgtaatcaatcctttcataaaaaataggggtagctgattgagccaccccgtaaaatagaaaatctgccagtagtaatgtaccgacagatttaatagacgatttcaaaaatcccatgattggttgagataaacgttcctgaaaggtctaaatcccgaccataggcttgataatcaatatagttttgaagactagctggtacttcgcctaaagcacccgtttcttcaatgtagtagcgtgccacgtcatacatatcatcacaatcggaatgaatgataatatcctcttgatgttcgcttagttcttcaatgcttgaaaaatgagtgagcagagcagatagctccgattgtaattcttcgggtaattccgataccatttcccatagtcgattgagttcgccaatggaagtgtattcgtcaaccgtaaagggtaactcgtagtcatgaatggcgtattcctcatattcatcattcaagccgattttctctttgacttcctcaaagtcaatgggaaaggtaaaccacgcaccgaccaattcgccctcattgtatttgcctaaattcgcaatatagacttgcatatcgtccatatattcacgtcctttctttgtagagattcaaaaatccctaccgcacttcgtttggtgtaccattcctttgcggaacataagaaaaccacttatattccacaaaagaacggttttatttaagcaccaataatgcgattgaatagctctagtaaaatgtcttttactccagcagcgttgaagactaagccaaccgcaataatcgcaataattaaaaagccaatcagtttgctaaactcacgcttgaagccaagatacaagccaatcacaacgattgctaaaagcaccagtgattgagcgtttgatagaaaccagttataaaggttttgtccaaaattcataaaaatgttctcctctctatattcaatgaatttgtatttgagttatttttttgttgttatcacgtcctgttcttttactgactgttgcttcaaaatctgcttgtgtcggtctgtcagtttcgcatggtcgagaatgtcttttacaacctgcgtctggttgatttcatcaagtttaatcgcaacctttaaggtcggggcaacttgatgagatagccagttcagcgtcctttggaaggagtaaggctctggttttgtggttagttttaatcgttcacgattgttcccaataaaccaagcccattcttcattcagtttccaatcagaacgaggtttggaatcgtctttatctacaaaacggatataccgattgataattttaaaggcggtatgctctggattgtcatagacgagtaaatcacggactgcataataggcacgctcatttttcaatcgaatctcaaaacggttttttacttctgcgtcttcaatgggaatatcatttttcttgtactgctcgtagtccttttcatagatacagaaataaacttcactttgtaatgaaccgatatagagggtgtttcccatacattccttttcctctttgcgtaccagttcgccactgcgatagcttttaaaactgcggaagacggagatacattcttcctgttggcacttttcagtgagtacagggatatttaaaatccctgtcttatcgttaatggcaaggtcaaggcgtttcatcacaccgccagccaccaaaacgtccataaagaactcataccagcttctttgttgtgccagaagatagctttcaaattgtctgcacccacgacctttcaattccaccagaactcctttgtccagttcatgggagcaaaggacgaatatgtcgcctaaagcataatgctctgaataagaatagaaaccatagtcctcatgaagaaaataggacagtttcagttgtaagatgttttcgaccacctgctgtacgtctgttgtcggaaagcgaattcttacataatcaaacagcatttcaaggggagcgtcgggattgaagcgttccagagcttcccaaagggactgctgtaaatcctctgatggcttgacttttcctgtttcaatatcgcttagatactgccttgtaataccagtcgcaacagctaaacggttttgagatagtccataagccaagcgtttttcttttaaatgctgtaaccaagtttgttcattcagtaaaaatccctccaatcaaaaaggcgtatgtcaacttttaaagcccatttgacatacgctgaaattttgtaaatcccttgtaaccaaaggattttctaatgtttttttgactgtttcctgtcgatttgtacccccctgttagatacggggggttaagtgctggcgtggctattgccacaccagccagcaagatcagtccacacctgcgacttccgcttcgcacgtcgcctgcgtggactgtctgctgttggataactttttaatttcctccaagaaatcatatccttttggtacaaggggagtataaaactctgatatgacacttgttcctacatcaacatagccacgacctttgattcgctttaagaagaaatccttttgtacgtcactgccaaacatcatgccatagcccatttcagacatacgacctaaagccactctgaaattaaactgatcacggattccgtcgcctaaatattttgcgtctggacgttgacaagccagtattagaaagaagccagcttgacgacctaacatgacaatctgtttcagcttattcataactgcggtgttttcttttgttcccagcatttccatgaaagcgacgtattcatcaaagattaagaagtgtgccgggagacctaagtaagcataatttttgccagtcttatagttcttcatctgcttcatttcctcactacgtttcatcatttcttcatagaatgtttcaatgcaagaaagcaagtcttcttttctatagtagacatttgccatcacagaacctaagtccgcaagatcagcatttttcgggtcaagaatatacagttttgaatctgtatgaagcaaggcttcaatcagtgtcagtataaagtaagttttaccgccacctgtaccaccagcaatcaacatatgagggagcttatcatattcccaccatacgtttttcattaagcgaagtttaccatctttagcttctacttcatcaatagaaatacgactggctatggtgtcatagagcaaagtatattccacataggaatcctttaactctttatccgtcagctcacagtacaagccactctctaatttcttttccaagtgtaagagttggtcttgatattttcccagcgtgatttccacccgtatctgtatcaagccatttttaagtcgataatacattttagggaagtaggttatcttttcctttgtacgaccagcactatctttaaagaaaccctctgttttgacctgttcagattcataccacttgttttcaagtatcatctttgccagtttttgacggtggtaaagttgtttaaccgtatcatagcgaacccgtttgaatacaaacgctaccagcaagcagataagaattgcgacactgaaactgataattaaatagggaatgtcaatcttatctgcttgtgataggttaaaatcctgccagttgatctgctggattgtcttcacatgaaacagtccgacaaccagcaggaaaacaggcaggagtgacgctatcgtaaaatgaaagactaaatctttaccagatgggcgaatccttttaccacgctgtttcatgcgaaaaagtctcctttctacctagcgactatttgtcttgtgtcggttctttctttgcttgtggttgagctttgaatgaactagaatcctttgtcagcacaatatcgtctgccttgatataccagtcaacatctgctccttgataggtggcagtagcaacggtgtccgcaatgggattgataagttccacccgtgcgttataatcaaactctttcaaaggcacgctggcaggaatacttacttgaatcatgcgtccttgtcctttggattttaagtcataggtacgttccttgatttcatctgaaaccgacccgtcttcattttggattctcacttcacgacgtagagcagagaatttcaattctccaaaagtcgtgtctttatctaatacaatgccatttgctaatctcatcatttttcctctctttctttattcttttatcatgtcgtcagcatgtaaaaggtaatttgtaaaaccacgagtgccgattttgtagccctctgcggtaatacgtggattgactaacttcacacgttcctcaaagccgaaatgtttttcgccagcttcagcaggaagcaccaccacaatatcatctgctctttgaacatcagaatagagattatagcttcttgataagacagttagccgtccgttgattcttcgctgaacgactttatcctcgccagcaaattctaaattgccgaatgttttttccatgttgggaatcacaaatttaagttccatatttttacctatcctttcttttttattggctgaatgaatgtttgatggtcttaaagagtggggaacgaccttttgattcttgattttttgttttcataagttcacttcctttcaaaatcgggtaaaaaaatagacacctcattttttgaagtgtctacctattaaatattcaaattttattggaagtatctttatatcttcacttttcaaggataaatcgtcgtatcaaagctcattcataagtagtaaattagtagtaaattgagtggttttgaccttgataaagtgtgataagtccagtttttatgcggataactagatttttatgctatttttatatataaaaaatataaaaaattggttcataaattaatttattcgatagaatgattcaatcgtctacttaaactttccgctgtgagaaaagtgcctgaaacaataacgtttcaggtactcgggagttttgagaccttaggctcaaaactaagtcatggaacttcttcgaagttcgctgatgtccgttctcacctaaggaaagtttctaagaggatcttatctacattctaatttctgagcttttcttattacatgatcccgttctttcctgtcggtaggttaatccctgcttccatcaaggcatcatggtagagtttatagtaggtatgatagacagtcgtctgggttccattttgcgcagtcatcgcgatgcggaaggaataacgaccatttttttcgatctgtgggcctaaaatcgtaggacctgtcaacacttctgggtgtttgtcttgttcagactgattgacctgagcaatcacctgatagatcttgtcgagatcggtatttgcatctagcggaatatcgattagcacgcgcatatcgccacgtgagagattgctgacgacggtgatgttgcgattcggaacaaagtggagagtaccatcaaagtctcgcacctgggtcgtccgaatcccgacactgctgacgatgccggcaatattaatagacccattcgtgagacgaacattgtctcccacatccagctggcgttctaaaaggataaagaaaccattgaccaaatcggaaagaaagccctgggctcccatcccaatagccaccccagcaatcccagcaccagccaagagactagagactggaaggcccagaatcgacaaaatccagtagatcaagatgaaatacaaacaatagtttaagagactctcaaccaaacggagaatcgtatttttacgggcttcatcctgcaccgtatacttaaaggatggtgttaatatccgcttaaccaggctatggatgacctttttcgcgataaaaaataaaagaaagacaaaaatcagagagatacattttgatatcagatcatcaaaaatcttcgtccagtctattttactgaaataacgttggaaagcttgactcatttattcgggcctttctatcaaagaatagtatgattatatcaaatattcggaaataaggctattttttgaaaatttcattgctttccccccctaactatcgtataatattccttaattattttttaaggaggtcttacatgattcatcgattgattaccacttggaataaaaccaaccttatgaaaaggatcgcaatcgggattgtacttggtgtcatcctagcccttctcttcccgaaagcaactggcattggactcttaggagagttctttgttggggggctccgtgcgatcgcacctcttttggtctttgcactcgtcgcaaacgccctctcccaacaccaaaaagggacagagactaatatgaaaaaagtcatcgtcctctatctcctaggaacctttgctgctgccttcgttgctgttttggtcaattacatcttcccgatcaccattaccctgactggaaaggccgctgaaggatcctctccaaacgggattggcgaagtgattagtaacctcttgctcaagatcgtcgacaacccggtcaacgccttgcagcaagccaactacattggaatcctttcttgggcaaccgtctttgggattgccatgagagaggcgagtgaacatagtaaagacctcctccaaactctagcagacatcacttcaaaaattgttgagtggattatcaacctagctccatttggaatcttaggcttggtcttcacgaccatcgctggccaaggactcagtgcccttagtaactacgggattctcttacttgttttggttggtaccatggcatttgtagccctggtcatcaatccattgatcgtctttttcatgatccgcaagaacccttatccccttgtttttaaatgcctccgtgtcagtggggtaacagccttcttcaccagaagttctgcagccaatatccctgtcaatatgcgtctctgtgaagagttggggctgaatccagacacctattctgtctccattccacttggttcaactgtaaacatggcaggtgcagccgtgacgatcaatattttgacgctcgctgctgccaataccttgcacattcaggttgactttggaacggcgctcatcctgagtgtcgtagcggctatctctgcttgtggagcatctggagttgcgggaggatctctccttctcatccctgttgcttgtagcctctttggtatcaccaatgatttggccatgcaagtcgtcagcgtcggctttatcatcggggtcatccaagactcatgcgaaacagccctcaactcttcgacagatgtgctcttcaccgccatcgccgaaatgagtagctggccaaaagaaaaacgctattaaatgctcctatctcaaatagacaagaaaacccagacctcgcgatctgggttttcttatttcttaaagtagcgattgctttctttgataatgacaggtgacagagctagtagggcaatcaagttgggcagagccataagcccattaacgatatccgcaatgacccagaccagatctaattttaggaaaccacctagtccaaccattaagacaaagaagatccggtaaagattgatatgtttgacaccaaataggaattcgaaacaccgttccccgtagtaagaccacccaagaatggtcgttgtcgcaaacagcaccaagcacagcgttaagataatgcctccaactgggccaaagacacctgtaaacgtatcctgagtcaaggtactagtgctgcccttagccatccactcacctgaaaccaagagcgagagtcctgtcaaactacagatgataatggtatcaataaaggttcctgtcatggagatcaagccctgctcgactggctcattggtcttcgccgctgctgctgcaattggggcagatccgagaccagattcattagagaaaactccacgcgccacccctttttggatagccattttgaccgttgctcctgcgaaacctcccatggctgcagtccctgtaaaagcacccgaaaagaccgatttcaaggctggaagcaattgatccagatgcaaggcaatgatcgtgacagtcgcaaagatataggcagccgccataaaaggaactactttttcagagactttggaaatccagtgaatcccaccaaaaatgatggtcgaaaccactagcgcaatcactacactagccacttctggagccgttccaaaactagcttgaagggatcccgtaatggaattaacctgggtcatggttccgatcccaaagagggctaccaacactcctgcaaccgcaaagaaaatagccagtggtcgccacttctctcccatcccgtgaagaatgtagtacatgggaccacccgaaatatgaccgttgtcatccttggtccgataacgaatggctaagagcccttctgcatacttggtcgccattccaaagaaggctgccatccacatccaaaagagggcacctgggccacccgtctgaatcgctgtagccacccctacaatattccctgtccctacagtagctgctagagctgtcgcaagggctccgaagctcgagatatccccgtgtccctcatcttctgtaaagatcaggcgaaaagcttttggaaggtagcgtatctgaagcaaacccaaacgaagggttaggtagatccctgttcctaccaagagcaccaacagcggggcgccccacactagattatcgagctgttgaaaaaactgcaatacatgatccattttctgtctcctttttcatcgaccgctcgacagaaaagagaaaaagaaagagcacatgtcaaacatgtactctggtcctgcttaaaataggggacttcccctatctttcgctctgtccttttacctgagagtttgagtagatgcatcctctaccttgccccttcggtgccatttctggtctctccagagttccgtccattcacagtcactcacgctcctgcaaacttcattcggtcgtatgtaattttctctattttaatctattttcaaaagtttgtcaatcgtttctgaaaatatcttgtaaactacctgaaaatgtacggtttttaatcactcaaggagaagtgattggtcatgaggttgctagcatcgagcaaaatcttgtccaagagttgatctgtcgcttcctggatttgatcactcatagcttggttttccgcctcaaaatcaacggtttcacctgctacaagtgcacgatcgactttattgatgcgcgcatgtccccaggccattgtcgtttcttggtaatcatccaaatcaccaacatggtgagcatagtgaggatctgctagtcctgcaataatccggttggcccagtagaaggaatccgttgttaccttagccgtcgtattggcaaagtagtcaggtgtcgtatccacttgggtaaagaaaggaacggctgtattgtaaggcatggagccataagaaatccattggatacctgtcgtttcttgtggtttattgggacgcaattgcagaatcgctgtctggctggtccggttgatcccgatcgtccggaaggtccgctgactcacgtgatcgccttcagggccataaggatcgtagatagtgtcttggtagtggttgctcaagacatatttgacatcttcaatcgtcaccttacgataaggtttttgacaccaaggaatctcgaagctccgtggatcctgcttgatttcaggattgaggaaacgctggatggcccaagcccgcggtgtattgtagtggcgatccttgtctttttggctaccaaaggcatagcgtggattaaaacctttcccttcttgatccaaaatcaaatggtgctctgtgacaaaacgttcaagatccgggtcacaaagaaactcatctggattgccaaattcaaaataatcacttcccagttggttggggttggtcacataggcatcatctggaacacggcgcgccatccagtggtgacctccgatggtttccaaccaccagatttcattcacatctgaaatggcaatcccgttagactcataagttccatactcttccaaaatctttccgagacgcaagaccccttcgcgggcggtcttgacataaggcaagaccaaggtcagcatgtcttcctcaccgatgccactctctacaagtggatctgcccctagcacacggctattggtcgtaatggtctctgtctcactcatagctacattgtagacattgatcccagcttctccccagatcccgtctttaggaatcgcatctggaaccgctgtatagcgaactggattatctggcaagtcgatttcaaaagttgataatactgacttgtaatgacgcagttgatcttccggtttgaccacgatcaatttcttgggcgtaaaaacgccattttgagaatcctctgttcgtgctacaatggtcgaaccatcataactagcattttttccgactagaatcgttgtacacgaatctgcactttcacgtttacgcatgcgtatcctcccaaatcattcattgcctctattatagcacttttaaaaaggaggacctactgaaaatctgatttaaaagcgaatccttttcaacaactttcaatcatttttattttataaaattttaaaaaccctagctgtttatcagctagattcagattgaagaaaaagttatcttagaaactttccttaggtgagcacggacgtctgcgaacttcaaagaagttccatgactaaattaagatacaaagggcgtctgcggataaagtcaaaataggaagtttgacgcagaatctttcgattctaggagaacttatctttttgacacaatccgcagcccttgttcaatttgtattgagccccttcgctctttaatttctgtgctcaggctaaaacagtttcccaaactgttttactctcaataattccgagtgcctgaaactgtattgtttcaggcacttttctcacggcggaaagtttcggtattttcttaattcattctaataattggaacatatttatatttctttgcagaattacttaacttatttttcttttaaaaaatttagtctacattctaaaccctagctaatgaaaagctagggcttaacttatcctttaaacgtaacaatagtcgcgccgcttccgcccgcattttggggggcatattcaaaacttttgacatgtttgttgcgtcggagatacttggtcaccccttcacggatgacacccgtcccaatcccgtggatgatatcgacttgggccatattgttgagcagggcctgatcgataaagccatctagctcttgcatagcctcttcatagcgttttccacggaggtctagacgcgctctgggcccactcgtgttcgagcgtttgacgacattcacctggcgtttcttaggttgagttgcttctttttcagccttgatgaggttgaattctttttcttccaaggtcatcttgatcaagccgacttgcgcctcccagcggccatctttgagttgcttgaccagggttccgcgttggccatagctgataaccaagatttcatctcccaccttaggagcacgcgcctttttggcttttttcaagaccttatttttagaaaggtctacggtctcaggagctagttttttcaactgagccttggcttcaatgatctcatgtggtttcaactgggatttagcgtgaaggccttgaaggatgcggtcactctctgagagggccatgtccacaatttccttggcctcttctctcgccttattgagctctatttctctctctctggtcagttcgttatagagttttcgaagagcgcgattgaatttgagattttcttgctcgacctcttgaatggtatccaagcgcttgcgactttctaaggtctgcgcctccaatttttcaataatttgattgacatcattatccgtattggtcatcttcatagcatcctggataatggtctcagacaagcccaaacggcgggcgatttcaaaggcattggagcgaccaggaactccttgcatgaagcgataggtcggacgcagactcgctgtatcaaattccatgctggcattttgcacgcctgcagtctcaattccgtaggccttgagctctggatagtgggttgttgccatggtcttaatcccgcgtaagcgcaggtcttctaggatagcaatcgcaaggccagccccctcttgaggatcggttccagcccccaactcatccagaaggatcaaggaggcagtatccacttgatgtaagatagatacgatattggtcatatgactggagaaggtcgacaagctctgctcgatcgattgttcatctccaatatctgcaaagacttgtgagaagatgcccacacgacttcctggatccgctaggatgggaagaccagactgggccataatttgcgctagtcccagcgtttttagcataatggttttcccccctgtattgggaccggtaatcacgatttctgtcaagtcctcggtaaaatgcaggtcattcgcgacggcattttcaatcaagggatgacgtagttgcaagagctgaatagagcgattgctgctaacttctggtaccactgccttataatcgcgcataaagcgatacttggccttgatcaagtccaagtgaccgataatccaagcgttatttgcaatctctgctgcatgagggcgcagggtgtcagacaattcctccagaatctgaatgatttcataccgttcatcggctcgatggttggcaatttcttcattgagattgacgactgcccgaggctcgatataaacggtattcccgctggctgagatatcgtggaccacccctgcaatccggttgcgataggtgttttttacgggtagaacattgcggccattccgactagcaatcacagcatccgccaacatatcggccttgcttttcagcaggtcttggagaatctctctgacctggtgttcattttcctggattcgacggcggattttggccaatttttcactggcaaaagactcgacaaagcctccttcgttgatagcttgaagcccaccttgtaggcgtggtaaatccaccaagttgtcaaagaggcgattgagcctttccagacggacattttccaagttgtcgtagaaatccttgagctcatgtgtcacccgaaggaccgcttttagcgctagtaattcatcgatattgagggatgcctccatccccaaacgcttggccactggacggacatcttgaatggtcgacacggcaaagcgaggctcttccaagaggatctgctccatatcttctaactccataaaggccgtttcgatgctttcttttttatcagttggagtaagggctgctagctccatctccccttgttctgtctgtagatagggttcaaagagttgcttgaccttgccaaactccagaatatctaagatttttttattcatatttctcctacaaaaaaagtgagcgtccttccttgaatcggacttgtctcactcctttcttcatttttgctccttaagctccgataatcgcagtcacccacaagttgtggaacagactggaactgatcggggtatgaaggatgataaagcggatcaatccacttgcatttagtctattttggatggaagccatgggaaccgttgagaggacagtcaagcccatctggatgaccaagagagttatcacgacggcgatcacacccgctccaatttgatacttgcgatcctccagtttttctggctggggtaccaagtgcataaaaatcccaatcacacgaccaatcagatagactatcgcaaaaatcaatacataagctaaacctgcataaaagatgtcatctaattgaaataggtagcggttggcataaaaataattcaccgattgccgagtaggactcgaaaaaggaacccatagagacaacaccttagccattcccttgtagctaccacctgcaatcaagagggccactaaggtcactagaaagtaataggactggaggataatccctcttgcatagccaatataaaagctccatgccaaaatcaataagattaagaaagttaacatgtatctcctcttatttggatgatttatcctttaagtcgtctaaagccttgcgacgaaaatcatctaattctttttctttgtcgtcaaactcgatctcgcgattcaattgcatggacaaactgtttactgccaataagatcgcgatggtttcgtcatctgcctctggcatttgttccttaattgcttggtatttttctttcgcaacacgttcgacttcttccataaacaaattatcatggttggttgttaaagtgagcgctttgtttccaaatgtaaatttatatctatttaagctcgccataaaaatcacctcacggtattataccaaaaaaggctagctttgtcagtagcaaagcccctcttcacagggattttccagtggattctttctttctttttgctccctctctccctgaatttgtggtacaatagtggttatggaaagtatgacactcactccaacacaggagcaaatccttgattttgtccatacctatcgcagttctctctctcaaagcaagaaccctcatatggattatttctttcgactagagggagcgaccgtttcgatctacaagtctggaaaagtcttgctccagggcaatgaccttactccttacctggcctttttcgggcaagatgcggggaaccctaaaggttctaccacttcatctgcacgacaagatctagccatgatcggaaccgacgaggtcggaaacggctcttattttggtggactcaccgtcgttgcatcctttgtcacacctgaccagcacgactggcttaaaaagcttggtgttggggattcaaagaccttggatgatcgaaaaattcagcaattggctcctctccttgaggaaaacatccagcaccaagcactcttattgtctccaaagaagtacaatgaagtcatcgcttctggctacaatgctgtttcggtcaaagtggccctgcacaatcaggccatctaccttctgttaaataaaggagtccaagcagagcgaattgtgatcgatgcctttacgacggctaaaaactaccaaaaatacgtgaaagctgaaaaaaatcaggtctcccaagctattgagttggaagaaaaagcagaaggtaagtatttagctgttgcagttagttccatcatcgcccgtaatctcttccttcaaaatctggaagatctgggtaaggaactgggctataatctccctagtggagcaggggcgaagtcagaccaagtcgctgctaaattgcttcagacctacgggatgaaagctctggattattgtgccaaactccattttaaaaacacagaaaaagcaaagaaattactagaaagataagttatgtcaaaaagaagttcaaaacattcatctagctcaccagtggtgaggttccttaaagaatggggcctcttcagcatcatcgttggtctcatcatcgcctcacgtatcttcctttgggctccggtcaaggtggatggccattcaatggatccaaccctggctgatagcgagtacctccttgtggtcaaccacctctcgattgatcgtttcgacattgtcgttgccagtgaaaaagacgacgacggtaaaaccaaggacatcgtcaagcgggtcatcggtcttcctggagataccatccagtacgataacgataccctgtatatcaatggaaaaaagaccaatgagccctatttgaaagactacatcgctcgtttcaaaaaagataaattgcaatcgacctatactggaaaagggttcgaagaaaatggagaactcttccgccaattggccaatacagctcaagcttttactgtagacaaggatggcaatcctaaatttaccttgaagttgctcgacaatgaatacctcctacttggagatgaccggatcgtttcaaaagatagccgtcaggtcggagctttcaagaaagaacaaatcaaagggcaagccgtctttagactatggcctatctaccctttcaaaacttattagtatagatcaaaaaactaaggctgaggcaatacgtcccagccttgctttataaaaaggaaagaaatgatggaatattatttttctggtactattgagcgcattatttttgaaaatcctagcagtttttttcgaatcctcttactcgacattagcgatacagatgcagaagactttgatgattttgagatcattgtgacaggcaccatggcagatatcatggaaggcgaagactacaccttctggggggagctggtccatcatcctaaatacggagaacaactcaaaatcagtcgctatgaacgtgccaaaccctctagcaagggcttggtgaaatatttttccagcgatcacttcaaaggaattggtctcaaaacggctcaaaaaatcgtggacctctatggggacaataccattgacaaaattctggaagctcctgaaaaattagaagaaattactggtctctccaagaaaaaccgcctggcttttgtggaaaaacttcgtcagaattacggaacggaacgcattctcgcccaactagccaattatggcattcccaataaattggcctttcagatccaggatttctacaaggaagaaactctccagatcgtggagcaacagccctaccaattggtggaagacatccaaggtatgggctttaaaatcgcggaccaactagcagaagaattgggtattgcaagtgacgctcccgagcgtttccgagcgggtctgatccacagcctctttagctactctatcgagactggaaatacctatatccaagccaaggacctcctgcgctataccattgaccttctagaatcagctcgtccagtagaattggatccttccactgtcgcccaagaattaggccacctcatcgaggaagacaaggtccaaaatgtggacaccaagatctttgacaacagccttttctttgcggaggaagggattcgcagtcatattggccgattgctggagaagggtaaaaaagcttcgtttgaccctgaaaaaatcaaccaggcgattgaggatgttgaaaaagatttggggattcgctacgatgcgattcaaaaagaggcgattcaccaagctattcaaaacaaggtctttatcctcactgggggaccagggacaggaaagactaccgttatcaatgggatgatcagcgtctatgcccaactccaccagctggatcttcggaagaaaaaagacctgccgatcctgctggctgccccaacgggacgagcagctaggcgcatgaatgagctgacaggacttccgagcgccactatccaccgccatttggggatgactggggatgatgacaccagccacttagaggactatctggatgcagactttatcattgtggacgaattttccatggttgatacctggctggctaatcaattacttagcaacatcgcaacagatacgaaactcttgattgtgggggatgccgaccaattaccttccgtcagccctggtcaggtcttggctgatctcttgcagatcccaagcatccctcagaccaaactcgaacatattttccgtcagagtgaggactcgaccattgtctcactagcaggagacattcgccaaggcaagctacctcaagatttcacagaacgaaaagctgaccgctcttattttgaagctggaagcgaacacatccctaagatgatcgaacaaatcacttctgctgcccttcgtagtcaaatccctgctcgagatatccaagtcttggcacccatgtacaagggccaggccggcattgacaatatcaatacgctcatgcaagaccttctcaatccagctgtcaaagatcaggttgtttttgacacgccagactgccaataccgcgatggagacaaggtcatccatctggtcaatgatgcagaaagcaatgtctttaacggagatattggctacatcaccgatcttctcccaggaaaatatacagaatccaagcaagatgaattgaccatccaatttgatggcaatgaaatcgtctacccgcgcaatgaatggtacaagattcgcttagcctatgcaatgagtattcacaaatcgcaaggaagcgagtttccggtggtgattctacccattaccaatcaaagccaccggatgttgcaacgtaatttgatctatactgccatcacgcgctctaagagcaagctgattctcttaggagaatacagcgcctttgattacgccactaaaaatactggtactgcgcgcaagacctacttggttgaacgctttaaggacctggacggaggcgaggcaaccaagaactcttcttcatccgttgacaccgcttctgctacaatcgaatccgcacaaagcaaggaagggactgttgaaacgaagactgagcctgatgaaccgactgtctatcgactgactgaagacaatctccacaccatctctccaatgatcggactgactgaagaagagattgcagccttttttgatgtcaaacaacctaattgataccccaaaaattaaaataagatattttttaaggctcattcaaatacagctgaaatttttcgccgtgaaaaagaggctgggacaaaagtcctagcctctcaattatttttggattgtcgagcaagacgcagtggttgagtgggctctactacgctgatttcatcagcttttacagccctactcaactgtgcggaggtgggacgacgaaatcgaattctaacgaattaccgatttctgtcccactctctcgggagttttgaaagtaaaacagtttggggaactgttttagtctgagcccagaaattgaaaagcgaagaggttcaaaacgaattgaacacgggctgcggattgtgtcaaaagcgtaaaatacattagtactaaatccaagacacagtagctgattgaattcttctcccgccttttagcccggaggaagaatcctaatcagccttgtgggggcaggacaacgaagcaatcccatacaacagtgcttctgtcctgctccctgttttgactttatccgcgaacgccctttgtatcttaatatagtcatggaacttcctggattgctgaaatcatccactggatcatttcacctaacgtccgtactcacctaaggaaagtttctaagatgactttgtcatcaatcttaggcgactagtgaacagactagtcgtcttctttttcttccaccaaaggtagatcagtatgatcgacgaaattggtcatggtgacacccaagaggcggattccagtatttgtcgattcaatttcttgaaaaatatggcgagcggaacgattgatccgctcagcctctcgtgttggctccgtcagtgtgatccgcttggtcaaggtggtaaagtcagcatagcgcacttttaagaccaaggtcttgccttgcttgccgtgttttaccagcgattgggccaccttactggacagattggcaatttcttctaaaatatcatcttcagcatagaggagcttgcggtaggtccgctcttttccgatcgacttgcggatgcgatggctcttgacagggctattgtgaatgcctcttgccttacgaaagagatcatagccaaagcgtccaaatcgatcaatcaaagtcatctccgggatggctaaaagatccgcaccagtatagacccccatctcatgcagccgctccactgtcttctttcctaccccgtgaaatttggcaatgtccatctggctcaggaaatcctcggcatcctccggcaagaccaccgttaggccacggggcttttggtagtcacttgccatcttggccaaaaacttattataagaaacacccgctgaagctgtgagatgcaactcttcccagatcgcatgctgaatcaagcgagcgattttgacagctgatttgctctggattttattttctgtcacatccaaataggcttcatcaatactcatgggctcgatcagatctgtatagcgcttgaaaatcttacgaacctgctcgccaacttctcgatatttttcataatttccagagataaaaatcgcttgaggacaaaggcccagcgcttctttggaactcatggccgaatgaattccatatttccttgcttcatagttacaggtcgagaccacacctctcccacctgactgacgagggtcctggccaattacaacaggcttcccctttaaactagggttatctctttcttcgacggcagcaaaaaatgcatccatgtcaatatgaataatcttgcgactcgtatcattcactaatggaaatatcagcatttttcaccctccttctttaccattataagaagaaaatttcagaattgcaaaaatcgactctccagaaaacatgaaaattgatggaaaaccgtgtttgttttcaaaaatatagtacagtatcgcagaggatttaaaactgtattataaaagaatctgttgtttttcgcaattcacctttgtgtaaccggtttctgtatggtatactactattgtaagtgcaacagatatagttgctagaaagacaatagaggaaaataaaaatggttgttaaaacagtcgttgaagcacaagatatttttgacaaagcctgggaaggcttcaaaggtgaagattggaaagaaaaagcaagcgtttctcgcttcgttcaagctaactacacaccatatgatggagatgaaagcttcctagctggtccaactgaacgttcgcttcacatcaaaaaaattgttgaagaaacgaaagctcattatgaagaaactcgtttcccatacgataaccgtccaacatctatcgctgatatcgcagctggatatatcgataaagaaaacgaagtgatcttcggtatccaaaatgatgaattgttcaaattgaactttatgcctcgtggtggtatccgtatggcggaaactactttgaaagaaaatggatacgaaccagatccagctgttcatgaaatcttcactaaatatgtgactactgtaaacgatggtatcttccgcgcttacactacaaatatccgtcgtgcccgccacgctcacactgtaactggtcttccagatgcatactctcgtggacgtatcattggggtttacgctcgtttggctctttacggtgctgactacttgatggctgaaaaagcaagcgactggaactctatcactgaaatcgatgaagaatcaatccgccttcgtgaagaagtaaaccttcaataccaagctttgaaagaagttgttcgcttgggtgacctttatggtgtagacgttcgtcgtcctgccttcgatacaaaagaagcaatccaatggacaaacattgccttcatggctgtctgccgtgtcatcaacggtgctgctacttctcttggacgtgtgccaatcgttttggatatctacgcagaacgtgacttggctcgcggtacttacactgaatcagaaatccaagaattcgttgacgatttcgttatgaaattgcgtactgttaaatttgctcgtacaaaagcttacgaccaattgtactcaggtgacccaaccttcatcacaacttctatggctggtatgggtaacgacggacgtcaccgtgttactaagatggactaccgtttcttgaacactttggacaacatcggtaactctccagaaccaaacttgacagttctttggactgacaaattgccatatagcttccgtcgctactgtatgcacatgagccacaaacactcttctatccaatacgaaggtgtaacaacaatggccaaagacggatacggtgaaatgagctgtatctcatgttgtgtatcaccacttgacccagaaaacgaagaacaacgccacaacatccaatacttcggtgctcgtgttaacgtacttaaagctcttcttactggtttgaacggtggttacgacgatgttcataaagactataaagtatttgacatcgaaccagttcgtgacgaagttcttgactttgacactgttaaagctaacttcgaaaaatctcttgactggttgacagacacttacgtagatgctttgaacatcatccactacatgactgataagtacaactacgaagccgttcaaatggccttcttgccaactcaccaacgcgctaacatgggattcggtatctgtggattcgctaacactgttgataccttgtcagcaatcaaatacgctactgttaaaccaatccgtgacgaaaatggatatatctacgattacgaaacaattggtgaatacccacgttggggtgaagatgacccacgttctaacgaattggcagaatggttgatcgaagcttacactactcgtcttcgtagccacaaactttacaagaacgctgaagcaactgtttcacttcttaccatcacttctaacgttgcctactctaaacaaactggtaactctccagtccacaaaggggtatacctcaacgaagatggttctgtgaacttgtctaaattggaattcttctcaccaggtgctaacccatctaacaaagctaaaggtggatggttgcaaaacttgaactcacttgcaagccttgactttggttatgcagctgacggtatctcactcactactcaagtttcaccacgtgctcttggtaagactcgtgacgaacaagttgataacttggtaaccatccttgatggatacttcgaaaacggtggacaacacgttaacttgaacgttatggacttgaacgatgtttacgaaaagatcatgtcaggtgaagacgttatcgttcgtatctctggatactgtgtaaacactaaatacctcactccagaacaaaaaactgaattgacacaacgtgtcttccacgaagttctttcaatggatgatgcattgagctaagattcaagcaaatcatataaaccagtcggaaacggctggttttttcatcccatcgcaagattattctgaattttgaaagagtttaagagcctaccacatagagtttgacagcgttttcttcaaatgttatagtagagctgtaaataatatagaaggggtgatcctatgtttttaacatttgttctcgctattatttggctctttatcttgattgcactgatctttttagcaacccttctcgtccaggatatgaccgtgcaacatcaccacccgagttaacgaatgataagactaaacaatagctattctaaacgaattcagaaaggataagaaacaaactagaattgtcagattttagttctgtctctcgtccttttttgctataatagaaacagattatttagtaagaaggaaattatggaagagtcaaaacagatcaaccaagtgatcgacgttctgatgttagctggaactctcctgttagaaagcggttctgagatccaccgagtcgaagatacgatgatccggattgcccattcacagggaatcgacgattgcaatgctttagcgatgccggtcgctattttcttttcaatcgagaatgccaatatcacgcgtatgaaacggatcttacggaccaattacaatattgaaaaggtctgtgatgttaaccagatctctcgtcaactggtctctggagagatggatctctctcaagcctaccaggccttgagagagttaaaaaataagcgcgttccttataccaatctccagttgaccattgcggcgactctcagtgcgcctttcttctccatcatgtttggaggaaatgtctacgacgcgattggggcagtcatcgcaactgtttttgccttttctttttcacttgtcgttgagaaatacgttcgtattccttttgcaacagcctttgcggccgcctttatctttggatttttagcccatatctgggccaaatatagtggttttccttccaatacggatctcattatcgctggctgtgtcatgcccttcgttcctggaattgccatgaccaatgctgtacgggatcttatgaacaaccacctcaactcagggatgagtaaactttttgagaccctccttatcacacttgcacttggtgccggaactacggtcgccctagtccttatgaaataaaatgatgaacctaactgaatttttaatccaagcggtggccagtttgattgccatcattacctttttaatcgtcctcaatgtgcaacgctccatgctaatccctggaggaatcctaggcatgagcatttggttgctttactatgtactaaaagggcctaccaatgtcatcgtagcaacctttatcgccgctattgtaggatcctgtatcagtcagattttaagtatcgttctcaagactcctgttgtggtctttatgttatccattctcgcccccttagttcctggatatatttcctatcggacgacttccttttttgtcagtggccaatatcgccaggcagtgaccagcgtgaccctggtggttattctggccttggtgatttccatcgggatggctagtggctctgtcgtcttgaaactgtatcattcttatcaacgttatcagaaaagaaaagcagctaatgtaaactagcattgattgcttttctttttatgattgtctgtagacttataaaatacatacgcgaatgctccaagcaaatcactaggaactaaaaagatctctaactattaagtaggagctgtatagaaactggtgaatagaaaactgatttgatgcttttccctccttaaaatatcatcaaagacacagataattgaattttcaaggaccccctattagaaatagtgggaaaataagaaaaaaagcccttttaaataaggcttttgaggtatctttctatgttttggtagctaatttggtagccaaagagaattattctataaaattacttgatatgagattgagtttatctgttaattcagaatcggcatttgggtataaatggctataaatactaagtgtagttttgacatcagaatgacccaatcgtctttgaatatatagagcatttacgttatattcattaatgagtaatgaagcatgggagtgtctcaaaccttttggttgaatgtatttaacacctgcacgtttagagtattttataatctggtctctaatactgcgtttacgatatggatttccgtcaagtgatagaatgaatggtatcttgtcaacttttgcttgtcgttctttccattctttaagtacgtttagagtattatcatcaaggccaatggttcgtctggagctttccgtttttagtttgttacgccgaacccaattattacggttgatgtactgtaagttatgattgattgcaagagttttcttttcaaagtctacatcttcccaataaagagcagtcgcctcatttacacgcattcccgtaaaataataaagccaaaaaagtgtataaacaaagtgctcaaagtagctctttttatcaagtgattgtattactttttggaactcgtcttttgtccaaaaatctatatgtttttttacgattggaataggactgatattctttgtgggaatttcatgaaaaatcaacccatatttttttgcagttttcaaaacttgattaagcaatgtcattttgtttcttgcatatgaatttgaatatctatctaataaactgtttctataatttattacatcataagttgtaatatctctaggttttttcttaccaaagtattgaataaattcatcgaaaataacttgacgtctgtgctcgagatctggacttgttgtagcataataatttggcataaaaacttcttccataaactgcttaaaagtccattgagtatgcttaattcctcctttttgttgcaccttgttcaatgcccttgtacgtgcttcaaatgcttcttttgcggtttcaaaaccacgtctgcgttcttgataaggtttaccagtagctaggtcaactccagctttaaaataataagtatatttcccagttttatcatctttcgtaacaccggtatatctagtttttgacatggagttcctccaatccaagtatttctgccacaactgatacgggaacagtcccaagccctttattgttatagaaatcgaaaccacgctcgaccataatatgttttgcttgccgtaaaatattataagcagtccactttgaaaaacctaagtccataatttcttgtactgtcatagttaatttatcgttcataagtcaatttctcctttactagtaagttctaggaattctcctattaattgtttgagttcattatttaatcgtggggtttgttctttaagtgcatcttgtagctctaaagagaatgagctactattaaatgcttttaaatgttttctaagcctagtctttttaactcttatagtgttaggttttagataggggaataattcgggtaagagtgcaggttcatggagaaagatataagcaaatgctttgctatcatctggaacacttgaaagactaaaaaagctaaaattctccaatcgtttagaaatctctgaaattgtttcctcgtttatagcctttgttcgaagttggaactctaaccgccaccaaaagggtttgctttctatatttaatttatcagctcttttgtgacttaatacctctatattcttatcgtataaacgtacttgaacattgctaccacttgcaccccagtatttgctttctatatttccccctctaccgtagaatattttatgactaacccctcctttgatatattgtaaaaaaactatttctggcctattaaagatatcaaaagcaagatctaatcgtgacagtctaatttctaatcgatttaatcgagcgtaattcataatctgcctccacacttgtaacccctcaaattcttttagtgagtttgggttgaagtctaggcgtataacttgataaccaccataatccgatagttgaaagaaaattagatttatactatcttcgtttatcgttttataaagagtaaaatagtcttctcttagattttcttgaatactaaattcttgaattatattatcgagtgattttcgtaattcacgaaatattcgtctaagtgattggttctcactatcaaagattactgttaatctgtcaatgctgatataaatagatttttctagttttgataaatctacttgactttgatattctcgtagagattgaatggtatttttcaatgtaacgcctcctttctatgcttaaaatctgcgtaattcgttgctactattgatttttgccaatgactcgttacttagggcgttgccttaagtgtatctgattgctggctgttagaaacgccagcttttatgttagagattgggagaacttcgagcttcgggcgctctgccttcggcccgcgcccttgcacttgtctcccaatctctaatttattagtttttaaactacccaaaatacttgtctagaaaactcgagagcagttcaagtgctcgaagttcaatttcttcgtctcgaatatcgttaaatacatcatcatttacttgaatatattcttctaaactaggcgaataaaaagaatgagtattgttaattttgttgttttgaaatgccaattgtgttgatgtcataatatcctcaatctagccatatctcgctttttatggactttttattaccattttggtataattgtattggttttaaacgaaagcctcagaacgctttgcagagctttctggggtgtttttgcatattcataagctaactagtattacctattttgtatgctttgtttttatataatcattttggttatataagtataacacaaccattttggttataagtcaatagaaaaacgaaaggaattttaaaatgttaaaagacaatataaaaaaagcccgactagatgcaggacttactcaattagaagttgctgaaaagttaggtgtagctcaagcccaatacgctaggtgggaaaatggagggagaaatccgaaagatgaaacagtagaaaaattagctgaaatctttggtacgtcttttgagattttaaaaggacgtgatgacggactagaagaaattgttagtttattgagagagtatgaattgacagaagcagataaaaaccaaattattagtcttttacaggacttcttaataaacaattcaatgtatgatgagctaccaacacctaacccaaagaaaaagaaatagtaaaattagaacttgtagaggtaagcatttgaaagagaatagacctgattttcgagatataaaatcatttgaagaatttaacagatactactggtatcgagatgaactttcacaaatttgtaaatctcttggattggagtatagatgtacaaaacaggagctgaatcatattatagaacaatattttaagggaaataggatagaaaaatttttgagcaaagggaacaaaaatcaatccgaagttataacattagatacaccgttacttgaatgcggatttgcttttaaccaaaaatttcgagattatttttcagaggtaataggcgttaattcgtttaaatttaatgctgatatggcaacagcttggcgaaaagtaaaaagggataacgatataaaatttacaatccaagatatgattaaaatataccatggagaatcagactatgccaaatatgataattcagtttgccaatggaaccaatttttaaaagatttttgtacagatgaatttagcgaatactattctaacaagttaaaagctgcagctatcctttggaaagaagttagagattcaaaaaatgaaaaaatatattcacgggaacttttgaaaaaatatgaggataaaatagaggcgtactgtaagtaaacaaatcccaagttataagtttctattagatgaaacctataaaatttgtacaaatattgtaaagaaatgtttcataaatcccataaagatattttagaattagctgagagatttacaaacgaagaattgttttcaaaagatgtctataagtgggtaggaggaagtgtacttggttcgtattttgtaagcactacttcaagtcattatgattgggcgatgaagaaattaaaagcacatcaaaaaaattgtaagaaaaaataagcagatatggtatctttttggtagctaaacagacaaaatatcttgttttttgcaaataatacttaaaaagaatgttgatttatcagcattcttttttatttcaaatgtattctcggaattacctaaaattaggaccttttaaaatcatctactctatcattcacccattccttttagtaaacaaaagttgagtctttttctttattattctctattttgaccttccacattaatttctaaccagcaacgattcaaattcggtcctaagaatgatttccaataggatctagctttttcaagggaattttgctcttaaatatggtagaatagtaacgaaatatactagtagatatcaaataaaaaagaggttaagaatgacaattgggattgataagattggttttgcgacgagtccttatgtcttgcgtttagaagatttggctactgctcgtgataccgatcccgaaaaactaagcaagggtcttctcttaaaagaacaaagtgttgcgccgatcacagaagacatcgtcacattggctgctactgcagcagatgatattttaacagacgaagacaaagaagcgatcgacatggtgattcttgcgacagaatctggaattgaccagagtaaggctgctgctgtttttgtccatggcttactagacatccagcctttcgctcgctcttttgagatgaaagaagcctgttatgctgcgactgctgccttggattatgctaaactccatgttgaaaaattcccacagagtaaggttttggtcattgccagtgacattgctaaatacggaattggaactcctggagaaccaacacagggggctggagcggttgccatgctaatcagccacaatcctcgtattctatcttttaacgatgacaatgttgcccaaacacgtgatgtcatggatttttggcgtccaaattatgcgacaactcccttcgtgaatgggatttattcaacgcaacaatatctagattctctgaaaacaacctgggcggaataccagaaacgaactggccttgtcttaacagactttgcggccgtctgcttccacttgccttatccgaaattagctctcaagggcttgaaaaaaatcctggataagtcagtgtcagaagagaaaaaagatcaattacaatacaactttgatcaatcgattctatacagccaacgcgtgggaaatatctacactggatctcttttcctaggcttgctgtcactactggaaaatcaaccccaactcaaagctggggaccgaatcgccctctttagctatggaagtggagcggtttctgagatctttagtgccaatctcgttcctggttttgagcaactcttagatcacaaacgcatggaaaaactggaccaacgtacggttcttagtgttgctgactacgaacgactcttttatgaggaagtagatctagatcctagtggcaatcaagtgtttgagcctgctacgcatcaaacttttgctttgacagagatcaaggaacaccaacgcacttaccagaaagtagaaaaataatggcacgattaccaggttttgcaaaactttctcccacagaacgcatagaggccttactgaaggaaggcctcttaacttgggatgaagcacagatcttaaaagaacaaaagggacttcccctttctattgcagatcaattgacggaaaatgtcttgtcgacttttgacttgccttttagccttgctccttattttctgatcaatggtcgtgactatgtccttcccatggtcacagaagagccttccgtggtcgcggctgccagctttgcagccaagctcatccaacgttcgggcggcttcaccacccaggtacaccagcgccaaatgattggtgagattgctctgacggatgttgaagacgtagaagttgctagcaagcgcatcctagaggacaaggaaacccttcttcagctcgctaatgaagcctatccttctatcgttaagcgtggaggtggagcgagagatctttgggtcgaaaacaagggggactttcttattgtctacttggctgtcgatcccaaagaagccatgggggccaatatgctcaacacgatgctggaagctctgaccgatcgcatccagaaactctctggtggtcaggccttgatggcaattttatccaacttggctactcgctctttggtgagtgcacggtgtgccatcgattttaaagtactgagtcgaaatcctgaggaagccattgagcttgcccaccggatggagcaagctagccaactggctcaagtggatccttaccgtgcggccactcataacaagggaatttttaacgggattgatgccctagtccttgcaacaggcaatgactggcgggccatcgaagcaggagcccatgcctatgctgcacaaagtggttcttacaaaggcttgagtcactggacaagtcagccgaaagagaaaaaactctatggagagatcaccctgccaatgccggttgcgacaaaaggaggctcgattggcctcaatccaacggttcaagtcagccaccgtttgctaggagagccttctgctattgaattagctggtatcattgcttcgctcggtttggcgcagaatttcgcggccctcaaagcccttgtcaccacagggattcaagcaggacatatgaaactccaagcacgctccctagcccttctagcaggagctaaagaagaggaagttccccgattggtcacccaactccttgagaataaaccctttaacttagaaaaggcacaaacactcttacaagaattgagaaaataaaagaactaagacccacgtcttagttcttttgtgtttgaaaaaattttcttattgttttaaaaatggcaactcgggatgtttcttggtatagagcaccacttcgataaaggtccctacttggacggcaaagagcagtccgacgagaagattaatccgatggtctgtttcataaaacggagagttccataagaagtgattggctactgttgaaagaacacaccagagcccaaagagtttttccttttgctgggtcacttgagacaacaagaggaagacaccaactgatacaacagctgtatagagggcatgcgaagctaatccaccagagatacggttaatggcctcagtgacagcggctaattggctggtttttgtttggcgggcaacgtaccctaaatcctcaatgatctgaaaaccaaagccagagcccaagccggcaattagaatcgatttcagatcttttttgccaaccatcaagactacccaaaaggcaaccagggccttaaagaattcttctgaaaatggagctgtcaaagcatccgtccacttgttaaagacagtggcatccttgatcacatggctattcataatatcaatcaagctattgcctgaaaagctcaaccagcctgctacgaaggctcctccaaacatggcaatccataggatgtaggttggtacggacaactgcttgcccaatcgttttgaaaaaagatagagcggaataataatagcagctaagacagacaagtttaagaccaagtctctgcctgcagactggctaaattcttgttgagaaagatgaccgagttcaaactccaagccaattcctgcaaacagtagaaaaagatagatagaggctctttgaattttagtcatcttgttttcctcccttttgtttctttgagcgaatcaggtagatcacaatcgctagaagggttgccccgaataagcctgctgctagaatgtaatcatagtcaaattcaacgagatcaatcttttcttcataagcagcatcttcttcgtcatctagatcctgcagggcactttttccgtgttcatctgctaccttttgttctgcttcttttctgatttcttgcaagcgttcgaaggttttctcagctctcgccaagctttcctctgttgccttcttactagcttcttcaggctgagaagcaagggcgatttgttcctgatcactcagatcttgttcgaccatccactgagactccaatcgttccatttcagtacgaatcgccccatcttcgaataaatctggatacttggccacaaggtcattgattcttgaaatggtccaataccaagagcgatcattgtaatggtcccctaattcttggtaggcttgataggtgttgagaatattgccatagtagggtaggtatggagcatttcgtggactacccatcgacagccacatggtgcctccacctgcactcgctgggacatcatctttcagttggaaaatatgggcctccatgacatttggattggaaatagggtatttataaaccgcatcaaactctccttttttcggaatgccttttccatccaactccatttgatcctgtggtttatatttggttccttccaaacgattacgttgcagattcatggcatcgcggagggttaattttcgatcggttgtatgaagaaggtcaaaggacgcatcatcatatttaacaggagagcttgggtctagcgatttgattcccgaccaaacccgagagcgatctgcttcttgcaaaggcggattataggattgagaaacgtggaattttccgtccacttccttatagctattggcttctttggcgactttttcaagatcttttgaggcgatcgtgcgttcggtatccgattgatcgacatgccctaagaagaaggtatttggaaagaccgcaaatcgatcctctgggaagagaatcgccgcatattgatggccagataggatttccatataccagacgccttctttatcggcaatggtcacaatatttccttctgcagcgcctttgtcttcgacgattttagcaatgagttcgaccccttctcttgcggttttcacactagggagaacgatacttgtcaagcccgattctgcgaggccatccttgacatagggatccaccttttggatcttgtcatttgctgaagcagatacagtggcagaaatggaaaccccatattcgttgaatcctgcttcgtcaaaaattccctgatcaggggtgacatctggaaccgctgtatacttatagctaatctctggcaagggatattgaaaaccattggcagcatcctcaaagatggctccttttttattgtagacacgctctctgaccacaaaatttttattatggttgggctctaaatcttcggtacgccctaccaaggttgaaccgtcggcagtcagtttcttcccgatgatgaaccctgtacaagcctcaacaggttgagcaatcaacaaaagcggaagcaaggctgctacagctgatcgaaaatagtgcttcttcatcctaaactcctttttaaaaatgtttttccttatttagtatactcttttacaagcctattttgcaagcgattccagcaaccgtaaacgattcgtaaactatcagaatttttgagggaaacactttttcaaaaaagaagaggctgggacaaaagccctagcctctcaattatttttggattgtcgagcaagacgcagtggttgagtgggctctactacgctgatttcatcagcttttacagccctactcaactgtgcggaggtgggacgacgaaatcgaattctaacgaattaccgatttctgtcccactctctttcattttctctgttgatttgcttgccacaattttccatagaggagatagtcgacttcacggagctctttcaggttctgacaaccgagcgcacaaaggagcaatctgaggtcttctttccatccttggacaaggacgatcacttcttcaatgctcttagtctctaccatctcaagaaaaacgcgggaaagtcctacgccacgtgctccaaggaccaaggccttgaccatatcaaggggatgacggatgcccccacttgctaggacctcaacctgatctatctgatcctgtaactgtaagagactctgcgcagttgactgtccccaatcatccagataagcgcgattgccaccacgacgattctcaatataggcaaaactagtaccaccacgtccagaaatatcaacggttttaatcccagcctctagcgctgcctgaactgttttgggatccataccaaagccaacttccttcaggactacaggtacaggaaagccctgcccatagctcttgagatggtctttccaagtgtggaaaatccgctccccttcgggcatgagcaactcttgcatcagattcacatggacttgaagaaagagggggtgtagctcttccactgtccgcaagcccaaatctggctctttatcgatgccaatgttggttgctaaaagaagatgaggatggtcttttttgaccgcatacgattgatcgttcggatccttcagtgctgcgctgtaagagccagtcacaaagagaatcccacaggcttcggctactgctgccaacttttgattgatctctttggcccgtttactcccgcctgtcatggcattgatataaaaaggaacctcccaatcacgccctgcgaaatgggttgtcaaatcaatctccgctagatccacaagggggagggatcggtgaatcagctcgatctcatcaaagctattataggaggagctttgctccaaggcatagcgaatatgctggtcttttcgattttcgctcacgaatctcccatcctttcttggtaaatgacttcaatattcttttccttccagcgctctatcaaggtctgagtctcaactgggtcaaaactaagggcgattccacagtcgcctcctccagcaccactggatttggcacagacagaaaggccctctgtcgcttcttgcagctcttttagagctggggtatagatcaaagggttcaaagactttaggttcttatcggcacgtttgatactggcctcaatttccctttgtttcccttcacggagacctttttcaagattcttcactgcgctctggctttcctgaagaaaatcttccttaatcgctcccttgacctggcggatcaaatcacttgaaatcgctggttccttggtccaaccgaccagaaaattataagcgactgctggctggatcgagcagatctggtagtcccaatccaggtctaaaacttgtgacaggggctgagaattcaaaacttcatgcaaccaagtccgatcaaaggattggtaataaatcaagtcctcgtaggcaatacaagccaaatcgcccatggaaccattgtcccctctttgcaccaagaccactgctgctagtcgaaagagcaggtccggatgtaggtctagttcatacagagcagccatggccttgatcacgagcaagaccacacttccgctggaaccaatcccatactttttcccctcttcgcccagtgttcctctaaggtgaagatcaaagggtttaggggttattccctgatctttcagccactcttccatgagctgaatggtctcttgaatcaaggcgtagtccttatttggggtcaaatccacctggtaaccaaagagatctgaggctagctggtaggctgttgcttcttggatggtagctaacagataaataggaataaactgaatcacagctccataaccaggtgttagcaccgcgtattctccagctagatagagcttacctccagtctgtacctgatacttagtcttcatcttgagggtcctttgtcttagatacgatggtccgatagcgggcatcaaataaaggtaccagctgatccaagtcttcttctaaacagaggactttaacgtttggccctgcatccatggtgaagtaacaagcatggtctgcagcccgaagctcacggacaaattccatagctttgtggctttcttctgtcaagtagctaaaggctggagtggctgttctagtcgtcgcatgcatagcaagggcattgcgctctgtcagctgaccgacccgttcaaaatcattggcagctagatagtccagcatgtccttataatcttgtcgagactcttcgatccattctttgaaattagtcgaggtctccatgcagcgtttcatcccttcccggctggaaacaggcttttgcttgtcattgaggaccagcatgatcatcgcgagttttaggtctgttttgaccttataaatctccccactttctttgtcccaggctgctaagggaccaaagaaagaccgtgaagaagaacccgaagcaaacttggctttttgagccaattcctcctggctcaagcccaaatcataatactgattgcaagccttgacgagagcagagaggccgctcgagctagaggacaagcctgctgcggttggcatgttgttgctggtatccacccgaacaaatctcgcttcatttgttggcttcaagctatcaatcacagctccaattttggcttgctcagctggattttggaattttccatcgatataaaactcatgcgcagtcgcatctgctggcaagggagacagacgggtctctgtatacatattctctaaggttaacgaaatcgaactggtcgaagggaccatctgtttggcatcttcttttccccagtatttgataatcgcgatattggcataggacttagactttacaggttttcgatccatgtatggtgcgctccttctttttctaatgcatgggcaatggttgctgcttcacgagaatccttgacgagggcaatcacacagccaccaagaccgcctccgctcattttagcgcctaaggccccattctcaagggcaacggcaaccaggtggtctgcttcaacacagctgacaccgacggctctcaagtgctcatggcaagtagtcagagcctgtcctaggctcgttagatcattcattttcagagcctcttccacctgctgggtcaactgaccaatctcatggaaatgggacaaaacttcctgccccttggcttcaaccttttgaatcgcctcacgggtattgccgtgaattcccgtatctgcaatcaccaagctagcttttattcccagctctagcgggtaaaagccgacattccgtatgaatttaatggcttgatcgctcaaacaagtcttggcatcgagcccacttggattcatatgggcaatggtttctgctcggttgaccaggatttctaaggtctcatcatccagctctttctgataatagtcaaaaactgcacgaatagctgcgatactgaccgccgcagacgatcccatcccccgtttttccggtaccatggactgaatgcgacagcgaatccgggcctctttaatcccgaggtgctcaagagacgcaaaaactgccatggacaaggtgtcatcttcaaacaaaatccatggactatctgccgggacgatctggcagatcacttcgatatgatggagtggcagcgcaatagccggataaccatagaccaccgcatgctctccaattaagataattttactatgcgcccttccgacgcctatctctttgttcatattcatctcgctctattaaggtcattactattttaatataaatcagccaaaaaagcgatgcttttgaaggaaatccaacctaagacggagttcaaaaataatctcctatcggttttctttctcaaggatagatcttaaaaggctaggatccatcatcctagccttccatttctattgttcaaattcttgtttgatcaagtccatcaaggagttgcggtccaggatccattgggcccgttcgtccttctcataggtccggttggacaaaaagatcacagcttcctgcctcttgcgattatacatgatgaaggttccagtatagcccgtatgatccaaccagtccccctctagattccatccgagagcgcgggtcttgccctcttcacgcgcaaaattctgagacaagtcacgcgcaaaatcctccttcagataatgctctaagaagcactctagatcagcaacagttgaaaaaagtccagcacttcccgcatgacgacccaatactctcgcttttggatcgtggacacttccagaagcaagcccacgaaccgttggcaccgccttttcgaccggtccaaaccgtgtttccgtcatcttccaaggtgtaaaaatcagctcttcaaataaacgatccaagggctggtgaaacctatcttctaaccaaaagcccagcaaaagaaaattgacatcggtgtaatgaaaactcttgtcctcttttaactgcaaattttcaagagcttctttcaattgtctcgcatccaattgatcccggttggggataaaaggatccagcccagaagtatgggtcaagagttcccggatggtcgtcttctcatgagcaaaacgcgggtaaagctctttaaaggggcgatcgagtggaagctcccctttcgcatacaaaaaggcacagatggtagcaactccgacgaccttactgacactagccaaatcatagaccaggtcagccactactggctctcctttttcaggatccgctagtcccagatagtgctcactccactgaccatcgcggtaaagcgcaagagaggcacctggatagatgccttcttggatttgttcggtaattttttcgatgattgccttcacgctcatcactccattcttatgcttcataagaaatatggacctgatcttgattggcttcaaaccagagttcgatctgacttggatccttggcaatcaagaaagttcccttacggtgcacaaaatcgacagcttctcccaagcgttctttcaagacttccacatcaaaaggatccaattcgatcttgatcatgctcaaatcccaagtcaccttgttctccacttggagatcttctccttgagcttcttgcaaatggataaagcgggcaagatctggcaagctgctatagaacttctcagcctcagcaagatcggccacattgacctcaagaaagttcacatcaaagctggtcaaacctttgaaatcttctggaagctcaacaagaggcgctttctccaacggttctaggctttcaagattttcttcagcatgcactaaaatggtatctccttgaggagacacaacttcaaaggcgcgaccattagctccttggtaaagggcgcttgtttctggctggcgggccaacaaataatcaatttcttgagcttgtgccactttcaccacgatgcgacccaatttctttggaccttcgaccttacgcgaacgcatactcggtgactcttctaagacaattttttctacttttgaggcatctcctaaagataggagagctccttcttccactaatactttcattcccaatgtctcttcataaaagcgttgattgacatttcggttattcactttcaagactgggatcactcttacgatctgatttgctgtcatactttcctccaagcactttttattgtaaaagattttctggctttttacaagaaatcttgtgcaaaaaagacagatttttcaaaaataaaaatctgtctttctttacttaatatactgttcgtgtatggacccgcccgtttggagcttcaaattcatattctaagtaatcctgataggtccccggtgcaatcactccacgaacatctaatacagccgttcccgcctgtcccacaattgaatctgctaacagacagcaattagtagacagaacaaagtaagatttaaaacgcgaagaagtaaatttatatagctcagcccctaaatcatatttcaatttgtaagcgtaggtcggctgaccgtcttccagtaacctcctaggtggatcccaaggttctaacaactgatcaatttcagctagacgcttctctactgcctgattctcttcttcggtaagggataggctgtagccaaacagcgtcttttgactctcttttttacatagttcgatgtatggttccttatccactttaaacagtacgccatccccaatcgtcccaaatagacgctctgaaaagggatcgtaacttccgtaagaaatgaccttcccctgataacaaatatctacatgcccaatcgctccaaataagttgctgtcagaagtatgaaccaaaatttctaattcccttgcctcttcttcttttttcaccaatcgataagggcctgtgtgtcccgccgagctccctttttgaagaaactggttaaaccgttttaactccttagcagggataaaggctgcaaagataaccggtaggctaatacgaaagcgacgttttaactcttggccttgttggtctttgtcaaataaaataccatctcgaatattagaaatccccaacaagaccagataagcccccaagaggataaattggaagtgcccatctgaaccaggttccaagacagttgctagaccaatcccaccgtttaaaagcgcatcccataaatagagccagcctccttttacccgattggccttataaagccaaaatgtgatcccatagacaatggcactccccaactgatatgcccctaaacaaatcacaactaagtttacgggcagactactcagtcgattcaaccagatcaacgcaagtgaaagaaaaataaaccaaatagagtggctataggaaatagacttgctacgtaacaaaaagcgaagaagaaagcttcctagtccatcaactaaaaagtaaatggctaatagatccaaggaaaatttggtgaaaccaacgccgtttcgaaaaatgagaatcccaaaaatgacggcaagaaccccaaacaataaggtccgtcttcttgcaacttgttcaaaagatatttttttcaatattccttctccttatagacgaaaggtctttagacaaatactattttatcaagtataatataagaagtaaagaacaaagaacaaagaaactgataaaaggagcagcctatgaaatacaatcaatatagctatctatctgttgaccaaaaagacattcttaaggaactaaaagaaattgggtttgaccttcccacccacctcccagaaaaagaactgtttgaatggtttgtccgcaaggtttacttcacctataaagatacagattatcccctctctaacctagtggtggattctaaaacagactttttaacttatatccaatctgaccgcgaatggtcttcgaacattttttacacagtagctctccagttgctcggtttccactattttattgattttgaagatacgaccagttttttgaaagaagtccaatttccgattgagtatggaaacttggttgaaaacctctatcacctcctcaatactcgaacagtcaaagggaatttactaattgatcagttggttagcgatggtttgattcctgagaccaaccagtatcactattttaatggtaagagcctcgcgacctttacaagccaggatgccatccgcgaggtcgtttatgtcgaaagccgggtcgataccgataaggatggtctgccagacttggtcaaggtcagcatcatccgtcctcgctatgaaggcaagattccagctgtcatgaccgctagcccttaccaccaagggactaacgacaaggccagcgacaaggccctctacaatatgaatgtcgacctcgaggtcaaagaacctcataccattcaagtagaaacacctcaattagaattggtggaccctcttggtcaagctgaactagtcgatgaagctgaagaaaccctcactcatatcaattccagctataccctcaatgactacctgcttccacgtggctacgccaatctttacgtctctggagtggggacaaaagattcacaagggctgatgactaatggaaattaccaacaaatcgaagcctacaagaatgtcatcgattggctcaatggccgttgccgggcctttacagatcatacacgcaaacgtcaagtcaaggctgattggtctaatggaaaggtcgcaaccaccgggatctcttaccttggaaccatgtctaacggccttgcgaccactggtgtggacggtctagaagtcatcattgcagaggctgggatctcttcttggtacaactactaccgcgaaaacggcctcgtgacaagtcctgggggctatccaggtgaagattttgattcccttgccgaattaacatactcgcgcaaccttttaggtggggattatttacaccacaatgcggcccaccaagccgatcttgatcgcgtcaaaaaagagttggaccgcgcttccggagactacaatcaattctggcacgaccgcaattatctcctacatgctgatcgagttaaggctgaggtggtcttcactcatggttcccaagactggaacgtcaaaccgcttcacgtctttaacatgttccaagcccttccagccaacatcaagaaacacctcttctatcacaatggtgcccatgtctatctcaacaactggcagtctattgacttccgtgagagtatgaatgccctcctctctaaaaaattgctgggctatgcttcaagctatgaattgcctactgtcatctggcaggacaatacaggagaacaaagttggacttccttggatgattttggcaatcaaacaagtcagcggaccttcctacttggagacggtgaaaaagtcatccaaaaccgctatgagacaaaagattacgagcgctatggcaaggcttatccgaccttcttaagcgatctctaccaagacaaggcccaacaggtgacgattgatcttccaatcgaagaagacctgcacctcaacgggaaagctcgccttcacctacgacttcactccagcaccaataaaggccttctctcagcccaactcttagagcttggaagcaagaaatacctccaaccctatcctgctgtcttatcggtccgtacgctggataacggtcgctaccatatgctagacaatttgaccgagttgcccttcaaagaagccggccaacgggtaattacaaaaggctatgtcaacctccaaaaccggcatgacctcttagaggttgaggccgtaacaccaggcgagtggatggaatttgactttgatctccaaccaaccatctacaaactcgaaaaaggttcaactcttcgcttggtcctttacacgacggactttgaaatcactgtgcgtgatcaaaccgattaccaactcaccattgacttagcacaatcaagcctccatcttcctgaaatgacagaggcccactagtcgtactctcaaagcttgtcctctctttgcttcatttgacagcttagcctacttatgttactatctaatagagtatttcatagaaaaagatattagaggaagttatggcgattgaaaaaactgtcagcgaaattgctgaaattttaggagtcagccgccaggcggtcaataaccgtgtcaaggcgctggctccagaagatacccaaaaaaacgaaaaaggggttaccgttgtaacccgtagtggcttgatcaagctcgaagaaatctacaaaaaaactatttttgaagatgagccagtcagcgatgatgtgaagcaacgcgaattgatggaaattttggtagatgaaaaaaacgctgaaatcgtccgtctctacgagcaactcaaagccaaagacgagcaactcgctaagaaagatgaacagttgcgcgtgaaagacgttcaaattgctgaaaaagacaagcaattggaccaacaacaacaattgactttacaagcaatgaatgaccgcgataccttgaaacttgaactcgaacaagccaacgaaaaagttcaagagcaagaaagcaaaggtttctgggcacgcgttttccgtcgataatccggggctggatcctaccagtcccttttcttttcaaccacaggagatttcccatgaaagcattagaagattatatcgccttcgatctcgaatttaaccaatacgaaggggcctatcagattatccaggtgtctgccgtgcgttttacggacggtaaagaagtcgatcactacgactcctacgtttacaccgataagcccctaaaaagctttattaacggcctgactggcattacccaggacaagatccaaaatgccccacaactcgaacaggtcctcagcgaattcaaggccttcgttggagatcggcccttgatcggatacaatgccaaaaagagcgaccttcccatcctacttgaaaatgggctggatctagaagaccagtacgctgtcgatgtctttgacgaggctttcgaacgtcgtccatctgacctccacggcattaaaaatctccaactccacaccgttgcagaatttttgggagtcgcaggaaaatcacacgatagcttagaggacgcccgcatgacagctcttgtctacgaacaattcctcgaatttgatcaaggccgtaccctccttgaagagcaagagaacttctccaccaaccccttcggaggcttggacttatccggattttttgatgaataaaaaaaggctcaaaactgagcagtactcctagagttagatgttttcatatctttctttgggggtgctttttatttcatttctgtaaagattgactaaagcaaattttcatccgacagacaagtagagcatattcaaagtcttaacttaaaatattagttattaaagatttaatcatttctaattttttgaatattcattgaccagacttattcttagatgtataatgagcatgtaaaatatatcacaaagaataatatgtaataagatttaatgattacatctgatatttctcaaccatagggttctattttctaggagagatttatgattaatatctttaaatatcttgataaaaaaacaaaatacctaaccattattggagcactggcaaatgggggtctcgcattagggcaacccttggttgttgccaaagcactatcgatagatcaaaataaccttacctattcctctatttggaaatttgccctctttggtttttctgtctatttctctttgtatagtcttatgttattttgtaatcatgcaaataatgtctttcgacgtgaaattcacatgaatatccgaacggcattatttcataagttaatggaagacagagaatatagtgaagatgaaaagattaccatgctgacacaggatatggaatttctaggagataacttttttgaacgctatatgtctatttcatgctggggatttggagcactgattacggcgatctatatcattgcccaaaatgttttattgggttctatctttgttttcttcacaatcttacgtcccattccacaattcttgatgaataataagctaaagaattcaggggatgaaatgtctcagggaagaacagccgttcataaccaaatctctgatagtattcgaggggctcaaaccttgcggatgaatcaagccttgcctgaaaattctcagcgcgtctggaatatcaatcttcgttatcaacgagccattcaaaagtttgcttttacccataatattgttttcttttgtaatggtttcatggtctttcttagccaagtactccccttggtattggggttcttccttgccatgcatggtcatcatgtttcagtggctagcctggttgctatgtatattgctgctggtcaactggtagggcctatccaaaatatcatgtatgatgtggttgaagtacaaggagccaaaacaacggcagaaaagattttcggaattttaaatcgagcagatgagagtgaatcggacaatcattcgatctcccaagtagaagagctagaaatttctcatttaagtaaatcttataacggtagagagattcttcgcgatcttaatctagccattcgacaaggcgaaaaagtcctcatcaaagggccaagtggctgtgggaaatcaaccctctttagaatgatcacaggggaagaaaagccggataccggaacgattacttgtcggacaagggatggagttaaaaccagtcactttgttcgtcaggtaggcattatcagccagcatcctttcctatttaatgatactgttcgctacaatcttagtttgggacaagagttttcagatcaagaattggacactgttttgagacaggtcaaactcgaccatgaactaactgatggacttgattttgtaatcactaataacggagaaaatatttcaggcggacaacgtgtccggattgaactagcccgcttcctacttcgtaaaaaggatattttattagcagacgaggtaactgcagctcttgacgcagaaaatagccagatggttcgagacttgattttctcactaccgatgatggtgttagaaatcgctcaccatattgatgatgaaagtcgatacgatcaagtcattgaattaagaaaagaataaaattactgacacaaacctaaaaatatatcgttagtatatcaaagaaagaaaaaaaggctcagtttgtactgaccccaaaaagttagacaattaatttatccaaaggatttagttctgtattgcacaggactaaatccttttagttttaccttaatgcgtttgttgttgtagtaatcaatatagtctacaatagcttgttccaattgcttaagtgagtgaaacgtcttctcataaccataaaacatctcagacttaagaatgccaaagaaggactccatcataccattgtctggactattacccttacgtgacatggatgcttgaattcccttactctctaggaatcgatgataagaatcgtgttggtattgccagccctggtcactatggagaattgtatttttataatgctcctctgtgaaggcttgttccaacattaatttcacttgtgctaagttgggcgaagtagaaagattataggcgataatttcgctattaaagccatctaaaactggtgataagtagagtttttgactgctcgccggaatggcaaactctgtcacatctgtgtagcacttttccattggtttggatgcttcaaattggcgttgaataaggttatctgctttctttccaatctctccttggtatgaagaatacttccgtttacgacgaatacgtgcacttaaaccaaggaccttcatcagacgttgaaccttcttatgattcactacaaaaccacgattccttaattcaagagtaactctacgatagccgtaatttcccttatgttcatcataaatggcttgtatttccactttgatagcttgatctttatctacttgattcagttgctttaagtggtaataataggctgaacgagcaagtttgataatgtttagaagaatatctaaaggaaactctgttaccaatccttgaacaatttctgtttttcttcttgcttcttttcgtccctcaatcggagttctctcaacttttttagaatagcattctccgctctcaggtactcattttctgcttgaagacgttctaactctgtcatctcttcaggttttttctttggtttacgtcccattttaggcggtctccctcttgttttctcaacaatagtatacccgtttttcttatattgtgctatccaattaggcaacattccaacacttggaagagcataatctagagacacccttatttgtgaacgaccttcaatcagaactttatcaatgatttctcgttttaatttaggagaataataacgattcctcccctttttaacaaactctataccgtaacgatccatcaatttaatcatgtactgaagattgggaatttttatcccaaatatatttgaaagctctttgaagcttcgcccttgttttctaagttcatagacctgaactttatcttcataagttaatttcattataaaacaccccaaaagttagattttttctgtctaacttttggggtgcagttcagttttgagcctttttttaattaatgaaaacttccttagcttaaaatggcaatttccctgcgaaagcaccgagttttttcttggttgcagcatcaatttcttcaatggcagcattgatggcttgcaccgtcatatcagagagagtttctgtatcttctgggtcgaccactgcggcattgaaatcgatggaaacaaccttcttatcacctgtaagagttgcaacaaccaagtcttgagcagatttccctacaaattgagttgcggctaattccgcttggctttgctccatttgcttttgcaatttttgagcttgcttcatcatattttgcatattcatcatagcaattacattccttccaacttctgaaatttacagttcattataccattttttaggcgcttggaaaagcctaggtgagggaactctgacatcatgcctgctgtttcaggcaatttcatgaagagagaaaagagttttgaaatctgtgggcctcatcttcctttaaaagccagaatgttctttcaaatactcctcttcttccttggtcgaaggccgtcctaagatggcattccgatgtggataacgcccaaattgttgaagaatgtccatgtgcatcttctcatacttcaaacgcttttctaagcccggttgatcaaataggcgcagagcttcttcatgaatggttaaagattccgaatgcataaagggcatgtagaaaaagcctctttgtacaactggtaattcttgggcttgtgttaggccttcttgggccaagaccaaggcaagcgaatcggtcataaaggcttgggccgtccctcgaaaaatattccgagggatttggtccaaaagcaaaatctctgccaagcgcccttgggcggaagcgcgccagctgaacaattctccacgactggccttccagtaaagttcttcaaagcgcacgcgcatttcttgatccagtgcgtctgattttttgaaccaatcctctggcttcaactcttcgaaccagaaccttatcacttccttcattgcttaacctgccataattttttcttttgttttttcatccaatgcatcattcatccggccgtacttatatccagccaaatccaaggctacataggtaaatccgatttttttcatgtagtcattgatcttgtcatgcagttggatggcttcaagcagatggtcttcttccacttcaatgcgcgccaagtctccatgcacacgcacacgggcttgctcaaagccaagtcctacaaggaactcttccccttcaaaaacccgttgcacattttctgaagtgattttcaccccgtatgggaagcgtgaggcaacgctacaagatggcaccttattccaattggagacccctctttccttagccaattgacgaatttctgtcttatagaggccggcttcttgcaagacactgcggacacccgcttcgtcccgagccttgataccagggcggaaatcgtcgatatcatccataatattgccgtccaccaattgctcaaagcccagttctgtaactgaatccttaatagtttggtacatcaattgtttggtgtaataccaaatattgggcgtattggcagcaatccgtggatcactcaattctctcatttccagaccaagcacaggtgctcctagctgatcggccaagtcgagcgctagatcgaactcttcatttgaaaacatctcagagttcacgacggccgcaataacattgtcaggtcccaaggtatccaaggccaccttcaagagataagaactgtcaatcccacctgaataggtaacggctacctttccgatttttcgtaaaatatcttgtaatttttcttctttttcttttctggtttgtgcttctgttgccatcttagaatagctcccttccgataaattcttcaatccgttcattatccaaaatcacgatcttttgctgtcgaatatccaaaacaccttctcgttttaattcattgagaatgcgattgacactgtttcgcgtcgaaatcccacaaaaaccggcaatatcttcattggtaatgttgaaatcaatcaagacgccgtcttcttgctccacaccaaacaaactgcttagtttttgcaaatgaaaacaaaccgccccttttttgccattcatcatcatatactgctgagactccatgctttcagacagtttattacgataatagtccctcacatagtcctgcagctctttttgctctttgacaaaattccaaaacttgacccgaggaatacgataaaaacttgcttcttctgtctccactcgcacattgaaaggtgagtctgtatagttggacacctcatcacgaatcaaagagacaatgtcaatggcttttagataggaaaaattaaactcacgcccatcacgcataatgacgctggtcttgaccacaccttctttcaagatgtagatgtaatcctctttgatcccacgataggagaggtaactatggtattttttcttgacgatcggcgttcgcctctcttccaaaaatttcactaaaaattctgaattcacgacggtttttcctccccatctgctctttcttgaaatcacactaatgatacacctgtttttgtttttttatgttattatttgttaacaacaaatagtacacacctcttttaaaaaagaattatactataagtatcagtattaataaaggagatcgcaataatggtagaaattaaattaccgtacgacaaaaagacgattgttgcaaagattccagatgaaaactttgctggtttgttagagtcaaaagcggaaaacttccataacccactgtctgaagaagaaactgttgaacgttcaatggataaccctatcggtagcccatctttggaagaactcgctaaaggtaaaaaagacatcgtgttgatcagttctgaccacactcgtcctgtaccttctcatatcattaccccaatcattttacgtcgtattcgctcagttaaccctgatgcacgcgtgcgtatcttggttgctactggtttccaccgtccttcaactcgtgaagaattgatcaacaaatacggccaagaaatcgttgacaatgaagaaatcgttatgcacatttcaacaaacgacgatgacatggttaaaatcggtcaacttccttcaggtggggactgtatcatcaacaagattgctgctgaagctgacttgttgctagcagaaggattcatcgaatctcacttctttgctggattctcaggtggacgtaaatcagtccttccaggtattgcttcatacaagactatcatggcgaaccactcaggtgacttcatcaactctgataaagcacgtactggtaaccttgaccacaacccaatccacgaagatatgctttacgctgctcgtactgcaaacttggccttcatcgtcaacgttgtattagacggcgaaaaacacatcatcggatctttcgctggggacatggttgaagcccacaaagttggttgtgaattcgttgcagacttggcacatgtgtctaagatcgaaagcgacatcacaatttcaacaaacggtggtttcccacttgaccaaaacatctaccaagctgttaaagggatgactgcagccgaagcttctaacaaagaaggcggaacaatcatcatggtggctggatgtgcagatggtcacggtggagaaggtttctatcgcaaccttgctgacgtagaagatccaaaagaattcttggaacaagccatcaatacacctcgtttagagactgtcccagaccaatggacttctcagatcttggcacgtattttggtacaccaccatgttatctttgtatctgaccttgtagatcctgaattgatcacaggtatgcatatggaacttgcaacttcatttgacgaagcgcttgaaaaagcctttgctcgtgaaggaaaagatgctaaagtagcagttatccgcgacggactttctgtcgttgttgaatagaatcaaacatggattttcaacccaatctagaacagacactccgttctttgcaagcaggccatctctccgttgaggatgcgctggagcaaatcaacggggttaaagaactagggtatgcagcaattgatactgaccggcaacgtcgcaacggcttccctgaggtcgtatacggcgaaggaaagacagttgagcaaattgaagggatactacaatttctttcacaaaaagaattgccgatcctcacaacaagggtctctctccaaaagggagaggctctttctcaacgctttccgactggccactattatccagaagcccgctgcttcgttctcaactctaaaaaggaagaagccgatcctgaacactacattgcggtcgtcacagcagggacaagtgatgttcctgttgcagaagaagctgcagtcactgcagaaacctttggccattcggttcgccgaatctatgatgtgggagtcgccggcatccatcgtctcttcaatcgcttagaagagatccaaaaagccagtgtgatcatcgtgattgccggtatggaaggagctcttgtcagtgtcgtaggaggccttgtggatgtccccgttattgccgttccgaccagcattggatacggaagcaaccttcaagggctaacaaccttgatgagtatgttgacctcttgcgcttctggcgtaacggtcgtcaacattgataacggatttggtgcagcttattcagcatgtatgatcaatcgactcaaccacaatcgaaaggaaaactgatgaccagtctatttttagaacctttttctggaataagtggcgatatgctcaatggtcttcttgtggaccttggggcagatgtcgagcttcttcacacagaactcgagaaactgggagtggatggtttccacctccacgttcatcgcgtcgcaaaaagcgcaatttggggaactgatttcgatgttcaccttcaccacggggagaaagatacggggattgaaggtgattttgatcacgatcacgaacatcatcacgatcatgaacaccatcacgatcatgaacaccatcacgatcatgaacaccatcacgatcatgaacaccatcatcaccattcccacgcggatgctcgcagttatgcggatatccacgatctgattgccgcttcacagttgagtccttttgtgaaagaaaagagtcttgaagtctttcttgatatcgcaaaggccgaagcagctgtgcataacatgcctgtcgaacagattcatttccatgaaattggtgcaattgactccatcgtcgatatcgttagctttttcatcctagtggaatcgctcggtatcgatacagtttactctactcctctcactgagggaagtgggaccatttcagttgcccatggagaaatgcctgttccggttcccgctgtgatgcagttgagaaaaggaactactattccgattactcaagacttcacagttaaaacggagttgattactccgacagggttagccctccttaaagcattgtccccaatctttgaaccaatcccctctcacctttccatcgaaagtgtgggctatggatttggtaaaagagagactggaaaattcaatgctttacgcggttcgctattgaaagaagacacctctcacagcaccactgttgttcatcgcacggaagatcaaattattgagatcaccactacgatcgatgatcaaacaccagagcaactcggttatattatccaccgtttcctggacgctggagctttagatgtctactatcgtagcgtcgttatgaaaaagaatcgccctggctttgaattgattctcttgattcaaagaagtcagttggaagatttttcagccctcttgttcaaagaaaccagtaccattggttttcgataccaacaagtcgaccgaaaggtcatgcaacgtcgatttgaacaaatcgatacggaatttggacccgttacggtaaaaattaaccagtacggatctaccactaaaaaaacacttgaatacgaagactgtcagcgtattgctacggagatgcagttgccgattcaagaagtttatcaccaattacaaaaatacatttattaatttaggagacattaattaacatgacacatcaattacttgcagaagttatgagtacagctttgatgattatcttcggggttggcgtacactgtgacgacgttttgaagaaaacaaaatatgctggaactggacacttattcgcgatcactacatgggcattcggtatcactgtctgcttgttcgtctttggcggtgtttcaatgaaccctgctatggctttgttgaaagtccttcttggtaaattgacaatcgctcaattcttcccaatcgcaatcgctgaaatgatcggtgccttccttggtgcagtcattgcttactttatgtacgcagaccacttcaagatttctgaaggtcaaattgatggtgttgctatccgtaacatcttctcaactaaccctaactgccgtaaccttccacgtaactacttcgtcgaagcgttcgcaacatttatcttcttgacatctatcatggctgctgaacacgccaacgaagcaatgcttccattcactgttggtttgatcgtttgggctatcggtatgggtcttggtggtactacaggtttcgcgatgaaccaagcgcgtgaccttggacctcgtttcgcttaccaaatcttgccaatcaaagataaagtaaacaacgactggcaatatggtcttcttgtaccaggtactgctccatttgttggtgctgtccttgccttcttcttcatccgttacttccttggaatcatgtaataagtcgatcgaagaatcattcaaaagcaagcatcgaagggtgcttgtttttttgattccttcattttccgaagccgtccataaaatgatataatggacaaagcaaatcatgaaagaaacaaaagaaggaagaacgacatgactcattttcacaccattgtcatcggtggtggcccagcaggtatgatggcgaccattgccagcgcctcttatggccaacctacactactaatcgaaaaaaataaaaagctgggtaagaaacttgcaggtaccggagggggtcgctgtaatgtcacaaacaacgggaccttagacgatttgatggccggtatccctggaaatggccgtttcctttacagtgtgttttcccaatttgataatcatgatatcatccaattttttaccgataatggcgtcaagttaaaagtcgaagaccatggccgggtctttcctgttagtgatcaatctcgcaccattattcaagccttagaaaataagattcttgagcttggtgctagcattgccaccaactgtgaagtggtctctgtcaccaagccagaagacgtcttcatcgtcaaatcagctgaaaacacttggacagctgataagctgatcgttacgactggaggcaaatcctacccttctaccggctctactggctacggacacgaaattgcccgtcacttcaaacataacattacggatctagaagcggcagaaagccctcttttgacagatttcccacacaaggccctccaagggatctctctgacagatgtgaccctcagctacggtaaacacatcatcacacacgaccttctctttacccattttggactttctggccctgcagcccttcggatgtccagctttgttaaaggcggggaaatcttatctctggacctccttccgactacttcttctcaagacttaaaagactttctagaagagcatcgagaaaaggccattaaaaatagcctcaaagccctgcttcctgaacgattagctgatttcttggcgcaaggattccctgaaaaagccaagcaactcactcctcttcaaacagaagagctcattcaaaagatcaaagagctacctatccccgtcactgggaagatgtcactagccaagtcctttgtcaccaagggtggtgtcagccttaaagaaatcaatcctaaaaccctagaaagtaagctcgttcctggactccactttgcaggagaagtcctcgatatcaatgcccatacaggcggttttaatattacagccgccctctgtaccggttgggtagcagggagccttcattattaaaaaaaacgaactcgattttccatcgagttcgtctttttattgttctttggttaatgaaaaacggaaatcattgtatttggtgtagtcaaattctgtattgacaggcgctgtgaaaacaatcggggtatagtgtccttcttctaagacaaaacctggctccagtcggaagttggctacacctagccctgtgatcccaggaagcaaggcatcagctccatccaatccttctgactcccaatagtagatattgcctgttgcttttactgctcttgctgtataggtagctgtccgagttggttcgctatcatttttgaagctaaccactgttgtcacatctccattggcatccactgtcattttaatcgcatccgcttgtgggctagatcctacccaagttcccaccagttctgcagggacagtagcttgcgtcgtagtagacgcattgtcagtcttactagagtcttttgcagctgtcgcgctactggcttgagtcgaagagctagctgtatcgtttgcctgagaggaagatgccgcactctttttgctattacttttggcttttttctctaccttgctggtagatgctttttcggatgaggaagctgtttttttatccttagcaccacaaccgccgagagctagaccaagtgaagcagccaccagaacagcggcactccaacggaagattgattttttcataagatcacctctttatctttctgacttccattatactccaattgttacaaaaatcaagtttttttgtaataattgtaatttttttgtaacatatttttccatttaaaacaccaatcgcaatagggcgatcaagacaattccaaacaaaacggttcccataaggtttttgtaacgaaaggcgacaaagagactgggaatggtcactactaggtccaaccagtgaaactgcgggaggcttccaatttttccatctactaagcttgataaaaccaaggcaaagataatggaaatgggcaggtatttgagaaagcgggtcacaggagccggcagtcccttgtatttgactaagaggaagggcaagatccgaggaatccaggtaacgagggctgaggccagaatggccatgaagatataactattcacgcgcatcacagaccacccccacaaaacagccgatcaaggtcgcagctaacactgctagaggttgcgaaacaaaaaagagtaagagaaagaaactcactgctactgctaacagcaccatgagcatggtcttggtcttttctgttagttgcattccttgaaactgggctgcaaaaatcccaataaacatagccactaaagcaaaatcaagcccaaaagcctttggatcaggtaggagagatcctagagctgttccgataaccgtcgcactgatccaggccacatagcctactagattgttcccatgcatccaaggaactgtaatggtatccgtctttaacttctcactcaagtagaccccataactctcatcagtcaggagacttccaatcccgatagtatgagcgagactagcatccttaaagtcagacgacgtatgcagactcatcaacatattacggagattgatcaaacacaccgtcaaggccatattcaatatcgaagaatgagccgcaatcagagagatcatcgcaaactgggccgccccagcatagaccaatacactcatcaaggccatctccaaaggagaaagatagggagacgccaccacaccacaagccaggccaatactgatatagcccaaagccgtcggtagcgcgtccctcaccccctgccaaaaatctttttccactctctcactcctttctaaatcattgacctctattataacacaagaaaaaaggttgaaaaaggaccaatgagagagaaagctttataatcccttccctcaccaatctttcattccttctatcataccgaattttctttcacctcgcaaatccgctactagttggtgagatcccagcaaaaaagccattggaccttgcacatccaattggctcctttatcttattcaattccttcaaaggctaggcttggtttggcattgaggtcccagcctgcgaagttttctttgttccactcactgacactggcataggcgatcatccctgcattgtccccgcagaggcgcagtggtggaatgatgaccttgacatcggtgatgtcagaagccaggcgttcacggagaccttggttggctgcgaccccaccagcgacgactagagtcttgactggatatttctccaaagccttcttggtcttggccatgagaatgtctaatacggctgcttggaaactcgctgacaagtctgcattggagaggctttctcctttttgctcagcattatggtgcagattgataaaggccgatttgagccctgaaaaagagaattccagattgtcttccttgatcatggcccgagggaaatcgtagatatcagccccttggtgggccagctgatcaatctcacgtcctgctggataggtcaagcccatgacgcgcccaaccttgtcataagcctctccgacagcatcatcacgggtctctccgacgatcttataatcaccagcttcactaacgtagactagctcggtatgtcctccactcaccagcaaggccaaaagcggaaactctaaaggctccacgctttgagcggccatcaagtgccctgccatatgattgacaggaatcaaagggaggccgtgcgcccaggcaaaagccttggctgcagctaggccgaccaagagagctccaaccaggcctggaccataggtgacagccacagctgtgacatcggcttctgtgatgccagcttcttctaaggcttcttcaatacaagcggtgatgacttccacatggtgacgagaggctacctcaggcaccaccccaccaaaacgcttgtgactttcgatttgactggcaatgacattggacaagagttggtcgtcatttttcaagacagccacgctggtctcatcgcaagatgtctcaaaagccaaaatatatctatctttcatttgggttcctcttcatgatcacagcatcctctatgggatcgtgatagtagtttttcctccgtgcaatttcttcaaaatgcatttttttgtataggccttgggccggttgattggacacgcgcacttctaagaaaatctctttttggtccggcaactgcgcaaataactgctgagctaagccttggccttgaaaggcgcgcttgaccgcaatctgtaagacctctgcttcatagagagtctcttgaatggcgacaaatccaaggacttgccccttatccacagctaggaaatagaagatcgattcctgctctaaatcagcttcaatctgctccaacttccaggggctagcttcatagacatcttccagcacagcgagaatagcagccgcatcttggctactccctttcctgattgttcctttcatcataggcgcttgatataagaggtcgttgtttccgtgtggtctttcagccaattttcctctgcttcgacccgtttgagataatgagggacaaaatcatggaggctagcgggcgcttgtttgagaccgagacgtccgattttcactgcatctggcagtgtttcataacaagcagcacttgacaagctagaggcgatctgctccttaaaggccgtgacttctccgacaaaggtgacctgctcactcgtcgctgcacgttctaggacttcctcaaatggaaaatgcccttctggtgcgaccagctgatcatcttggtaaaaacctgcataaacgttgttccgacgggcatccatgacaggcactaccaaaccttctagatcatctggcactagggctaagaggctcgaaaccccgaccaattcaatccctaaggtatgagccaaggtctttgcggttgcgaccgcaatgcgcagtccagtgtagctcccaggaccttctgccaccacgatgcggtccaagtccttgggtgtcaagtcaatttgttgcatcaaaaaatcgatgaccggcatcaaggtgatactatgattttttttaatagttaatgttgtttctgcaagtagagtctcatcttctaaaatcgctacagaaagagccttactcgaggtatcaaatgctaataatttcatttcctactcctcttgaactggattatattatactacaaattcccttcaaatcccagcgaaactctcccttagagcgcaggattttcatatccaaaaccgctcaaaagcttctctattatagccctttgcctctctgacttttccagtctatcttttacttacaggcaaatttatgatataatgataattaattgtatcgaatcaggtccactagttgcgagtaggaaactctagtgattgcactccttcgtagctaacaaatagaccgaaataatgaaaggaaaattacttcatgatttacaaagttttttatcaggaaacaaaagaccgcaaccctcgtcgtgaaaccacgcatgcactttatctcgatattgatgcaccaaatgaacgcgaaggacgcatccaagctcgtcaattggttgaagcaaacacagatttcaacattgaatttatcacaccactttctgagcaacaccttgcttacgagaaagagtcaggtgcttttgaactaacggagtactaatccatggcttataccttaaaacctgaagaagttggtgtatttgctattggtggacttggagaaatcggaaaaaatacctacgggatcgaataccaagatgaaatcatcattgtcgatgccgggatcaaatttccagaagatgacctccttgggatcgactatgtaatcccagattactcttatatcgttgacaatatcgatcgcgtcaaagcggtcctcattacccacggacacgaagaccacatcggtgggattcctttccttttgaagcaagccaatgtccctatctacgctggacctttggcgcttgccttaatccgtggaaaattagaagagcacggtcttcttcgtgatgccaaactctacgaaatcaaccaaaacactgagcttcaatttaaaaatcttaaagcaaccttcttccgtacgactcactcgattccagaaccgttagggattgtgattcacacccctcaaggaaagattgtctgtaccggagacttcaaatttgacttcacacctgttggagaaccggctgacctccatcgtatggcggcccttggggaagaaggcgttctctgtctgctttcagactcaaccaacgcggaaatcccaacctttactaactctgaaaaagtggttggccaatccatcatgaagatcatcgaaggcatccatgggcgcatcatttttgcctcctttgcttcgaatatcttccgtctccaacaagctgctgaggccgctgttaagaccggtcgtaagatcgtcgtctttggacgctcgatggaaaaagccatcgtcaatggaatcgagcttggctacatcaaggtccctgctggaaccattatcgagccaaatgagatcaaagactatgcagctaatgaaatcctgatcatgtgtacaggaagccaaggagagccaatggcagccctctctcggattgccaacggaacgcaccgccaagtgcaactccaaccaggagataccgtgatcttctcttctagtccgattcctggaaatacaaccagtgtgaataaattgatcaatacgatttccgaagcgggtgtcgatgtcatccacgggaagatcaacaatatccatacttctggacacggggggcaacaagaacaaaaacttatgctccgcttgatcaaaccaaaatatttcatgcctgtccatggtgaataccggatgcagaagatccacgcaggacttgcgcgtgattgcggagtggaaaaagacaatatcttcatcatgagtaatggtgatgtcctcgctctaacagccaactctgctcgtatcgcaggaagcttcaatgctcaagatatctatgtcgatggaaaccgcatcggtgaaatcggggctgctgtccttcgtgaccggagagacctttccgaagacggtgtcgtgcttgctgttgcgactgttgacttcaaatcgaagatgatcttggctggaccagacatcttgagccgtggttttatctacatgcgtgaatcaggagatctgatccgtgaaagccaacgcatcctcttcaatgcaattcgcatcgccttgaagaacaaagatgccaatatccaaaccgtcaatggtgcaattgtcaatgcccttcgcccattcttatacgagagcacggaacgtgaacctatcattatcccaatgattctcacaccagatgacgaaaattaaaaaacaaccagttgagaccactgtttcaactggttttatgatgactttttgaggatcaaaaagagagtgggacagaaatcggtaattcgttagaattcgatttcgtcgtcccacctccgcacagttgagtagggctgtaaaagctgatgaaatcagcgtagtagagcccactcaaccactgcgtcttgctcgacaatccaaaaataattgagaggctaggacttttgtcctagcctctttactcttgtttcttaataaagatctaaatagttgtctacttcccattgggatacgaaggtcgcatagcttgcccattcgattcgtttggcttcaaggaagctggtgtagatgtgttcacccaaggcagctttcaccacttcgtcttctgtcaaggctttcaaggcattgtgaagggtagaaggtagatctgtgattccagctgctctacgttcttccggtgtcatcacatagatattttcttcgatcggagcaggtgcttcgattttattttcaataccatgaaggccgacttcaagcaagactgccaaggctacataaggattggccattgggtctacggagcgtaattccaaacgagttcccataccacgtgatgctggcacacgtaccaatggggaacggttgcggcctgcccaagcgatataaacaggtgcttcatatccaggaaccaaacgtttataagagttgacggttgggttggtcaccgctgtaaagttatatgcatgcttgatcaagccacccaagaagtgataagctgtttctgacaattgcatgccctttggatcttctggatcaaagaaggcattgttgccatcttggtcaaagagagacatattacagtgcatacctgatccggcaattccaaattttggtttggccataaaggttgcatacaagccgtgtttacgggcgatggtcttcacaacgagtttaaagatttggatcttgtcacaagcgcgaagaacttcgtcatacttaaagtcgatttcatgctgaccaacggctacttcgtggtgactggcttctacttcaaagcccatcttggtcaagacattgacgatttcacgacgagtgttatctgcaaggtctgttggagccaagtcaaaatagccacctttgtcgtttacttcaagagttggatctccattttcgtccaacttgaagaggaagaattctggttctggaccaaggttaaaggatttgaatccaagttcttccatatgacgaagggcacgttttaagttgccacgtgggtcgcccgcaaatggtttcccttcagtcgtatagacatcacagatcaagccagctacgctaccattttcatctccccaagggaagactgtccatgtatccaaatctgggtaaagatacatatctgactcgttgatacggacaaatccttcgatagaagaaccatcaaacatggctttgtttgaaagaaccttgtccagttgctcatcggtagctggaatttcgacgttcttcatggttcccaaaatatcagagaacatcaagcgaataaaagtaacatttttttcttttacttcacggcgaatatctgcagcagtaattgacatttttgtctccttaaaatagattacaagcatatgaaatgatcaacgaaattgaccatatggcgatggggaagatgtgaagcgactttgctgaataatgtcacgatgaagagccttacggatctcttcttgactgacaaccttggtttgctcttgctctttttccgcatattttttcttaatatccgcaatattgaagccatctgagatataatctttgatctcaagcaggcggtccatatcgtccaacgaatacatacggcgattgccttctgtccgatcaggagaaatcaatccctgatcttcataataacgaatctggcgagctgtcaagtcggtcagcttcataacacttccaatcggaaagactgccagcgagcgtcgtaattccttttccttcataccattcctctttctattctattatatcgaaaaaaaaatctatgtcaagattaaatgttatataatcttacataggttttttgtgtttcttgagaaaatcgcgaatgcgatccacatccgaattgaccaaaatcgcaacgaaaacgccaataaaggtctcaaatattcgggcaaaaacatacaagaaggtttctccgttaggaatcgagagggtaatgatcagcattgccgaaactcctccaataattcctgctttattattcatagcgacatttgtcataatggttaacatggtcgcaatgggtacaaaaataagagtcacccaatacgccccatgaaagagcgtttttaaaaggaagaacaatacggcataaaaacctccgatactgttgcccatgacacgcgaagccccgaagtggacactcttatcaaagtcttccctcaaactaaaaacagctgtcaaggtcccgatctgaaggcctcgccagccaaatattccaaaaataagtagtacaataaaaacggcaatccctgttttaaaggttctcatccccaaacggaatttggaccaatcaaatttgtgtcgtttaaagtaatccatggtcacctatctttctatttctattattctaccatattttcagaaaggagagaacagttatcaatagaaagaaaaaagagagtgggacagaaatcggtaattcgttagaattcgatttcgtcgtcccacctccgcacagttgagtagggctgtaaaagctgatgaaatcagcgtagtagagcccactcaaccactgcgtcttgctcgacaatccaaaaataattgagaggctaggacttttgtcccagcctctttcattctatttagattatttatctgtaagagcagccaatcctggaagttctttaccttcaaggagttccatagaagcaccaccaccagtagagatccatgagaatttgtctgcacggccaaggttgatcgcagcagcagctgagtcaccaccaccgatgattgatttaacgcctggttgtttcacgatagcgtccatcacaccgattgtaccagcttggaagtcagggttttcaaatacacccataggtccgttccatacaactgttttcgcaccagtcaattcttggtcgaatttagcgattgatttaggaccgatatcaagaccaaggaatcctggatctactgcttcaccttcagtgtctttcacttcagtgtagtcagcaaatgcgttcgcttcttttgagtcaactggcaagatcaatttgccgtttgatttttcaagaagagctttagccacatccaatttatcttcttctacaagtgagttaccgatttcgataccttgtgctttgtagaatgtgtaagtcatcccaccaccaataaggactttatcagctttttcaagcaagttttcgataacaccgatcttgtcagatactttagatccaccaaggatagctacgaatggacgttctggagcttcaactgcttctttgatgtaagcaatttcattttcaagaaggaatccagcaacagctttatcaacgtttgcagagataccaacgttagatgcgtgtgcacggtgagcagtaccaaatgcatcgtttacgaagacaccatctccaagtgatgcccagtatttaccaagttcaggatcgtttttagattctttcttgccatcaacatcttcgaaacgagtgttttcaaccaagagaacttgtccatcttcaagagcgttaacagctgcttccaattcagcaccacgtgtaacacctgggataaatttcacttcttgacccaatttagcagccaagtcagcagctacaggagcaagtgatttaccttctttatctgcttcttcttttacacgtccaaggtgagagaagaggattgcacgtccaccttgttcaaggatgtacttgatagttggaagagctgcagtgatacggttatcgttagtgatcacgccatcttttacaggaacgttgaagtcaacacgaacgagaacttttttccctttcaagtcaacgtctttaacagtcaattttgccattagatatgactccttctttttttaatacatgataattatatcacaaaagctgtaaaagaggtagaaaaatccaatgcttttcccctcttattgacagtctatcccggaaaccctataatagggataaaaaggagatataaatgaaagaaggattatctactcaacaaaaagaagccgacaaagatttaaatatcttggcacttttcaccttgcttccactgatgggctttctagcttttcaggagccaatcatcaacttcagtagaagtccagaccattctctctggattcgcttaatcgttctcgcactttgtcaattttctgtagctggcttgggaactagtgctgtccttattcgtcgaaaagaaagcatacagaaatatggattggttaagaaaaaattctttccaactatccttcaaacagttcttattgccttacctcttctcattttcctcatcgcttcaggtcaggttcattcctatcttccttttcaatccatcctcctaacaaaagaagtcttatccagtcccttcccaaccaatttcgtgggctatcttctcatttctcttatttggggattctgggagggctttaattatgttgtgattgcccaaaaaatcaatctccgctatcctcagtacgtaaaaggagtatggaatctaggagcatttgtttgtgctttgatctgcttgcttatccacgggatgattggttttgactcattgtccctcttgcaagaaggaactgttttcattctaatttatggaatgcttctagttcagagacgtacaggaaatgcttggggctgtattcttatttttatcctcctttggaatgccttttaatattctcaaaataagatcaaacctctctggttttcaccagagaggtttttttgagagtgactttttaagtgaacgaaagaattctgtaaaagacttactcttctttcttcttaccagccaagaggaagccgcctaaggctgctaggagaacagcttcagctgcaaaggaagcttctaggctagccgtatttggcaagtgttccgattgactttctttgcttgcatcttttgtttcttgctgaacagtcggctgtgagtttactccttggtgggcacttaacaactgatggatctcttgatcgaccatatccttgtgatcttcctcttgatgactcgcttgagtagaagtcgttgggggcaactgatccacttgagaaggctctgtaggcttcaatggattagctggatctggagtcactggggcagctggttggactggttgatttggttgagccggttgaacaggctgatctggtttagccggttcctctggttggatcggttggtctggtccttccgttttggctggcttatagacaatcgcatagtgggtaaagtgaggagcggtaaagatgaccacatctccaactctctcaaaggccaaggattgaggagcttgaccttcagggaagaagagaacttgctccacttctttatccttatccacaggaatcttcacaagggatggatggtgggtatcgatatcctgaccacttgcatccacgccttcaatatcaaagacgattccttctcggcccttcagctcttctttttctacctgattggcttcaacttttgcgacttttagtcctttgacaacggttggctctaagttggagaattgaacttcgactccagtcgcagagtctacaaagaccgctggcttatcttctttcaggagcgcaatcaaggtctctagaccggtcttagctgtttcaagcgcttcaggagtgagttctgaagaagctagaagctctttatttttctcaatcagtgcctgcaaagcctcaccagaagggtgatttggcttgcttgctaatagagcggtcgcttcctctgtcagggcagagagagcttctttttcttttgttagattagcttgaccatccaaggctttcaagagagcggtcaattggttcaactgctcattaacttgatcttgtgtactggtatcatgctctttcaagactttttcagaagcagccattccagccagcaaagcttctttgacttcaggagtcgcaaaagtaaagtctactttggcttttgcagcttcagcttcagccaatttttgcttgaggtattcatcgttgagagctggttttggattgacgaggacatcaaagcttgtgctagctcctttgtaatggacagtgagggtttgacgaccttccttggtcgtatcaaagccagttacttccacaccttcatctgtcaaggcatgcgtttcggtcgtttcatcttcaaagacgactgtaaagcgtccgccttctttctccaatgcttctccgacaatatattccacttttggtttgtcggtcaattctagaccagcaactgctttttcacccgcttcctctgcactgaccacaaaaacagtgagagtcttatccaatttctgaccaaggtaagaaacttctaggtgttgttctccaagcttgctactatcaaagccatgaatctctacacctgagttggtgaggttgaccagttgatctgcttgaccatctttataatgaacacggagtgttgctcctttcaaggaaagagcatccccttcccggtagaccttcttggtcaaaccatcttcaaattgaagtcccgcaatttctttatcattctttggaacttcgatcgctagaacattactgatatctttgccaggttcttgcgcacgatagtagagaagagatggggttgattcaaaagcgagcggtttaaagatgagatttccagcttgatcggctgtcatggtcgcaattggactggtcgcttctttatcagcataaagagtcagtgtagtattggccggaacatctttgaagccgacttggacaaaatgattgcctaagttttgcgctgcagcatgtttcatcgggatgttgaccgtttccgtatccagactttcatacatcttccaattgtaaatccggatggcttgccatggggtgccgttatctgccgtaatgacatggagacgccagtcttgagccttgattggatggtcgagtgtaatgtcggatacatgggctttattgccacgaacttccttagcgagcttccattcacccgcttcatccttgtagtaaaggtcgaagtcacgggtattcatcttgccatcgtcgacagattctccacccgcaccggcatggtccatgacccaacgaacaatggtccgtggttgtgtcaagcgaatatcgacggttccactcaattgagcagaggaccatttatctgaaagactggtaatggtaccatttaacatcccctcgatgccttcactaccatccgcatctgggaaactcgaaccgatcactttggctccgatgaccacgtttggtgctagggcttttggaagactggtatctgacacggtcatgccccaatcaaaggccacagtccctgcatctgaacgttggccattcttcccaactgcaacgaccttgaggtcctgagtcgttccttcagcacttgctgaacgactaacttttggtagatagacggtggttgcagaagaccccgttaagaggcgccagttgtcgccatctttttcatagacttcataataatctgcgtccgctacccctttaaaattgaggactgcttctgcttcttgcgcattttgtaggcgtttgccttgcacagttacttcagaaggagcagctggtttctcttggttcgacgtaatcgacaattggccaagattaaatttgtagtctttgacatccgtatcatggtcaaagaacatcttcacagcataaatggttttgccagccaaacttcccaaatcaaaggtttgagtagaccaatccgcactcggtgtcaattctttccattcgtattcagagtagtcttcttttgtggcaacagctacccaggcagctgctccgaccccacctttatgactgacgcttaattttgtcgtttctgtcacaggaatcttggtcgaatagagcatgacattttgactgctattggcttttaaatctccctcaaaggctagagagttccctccattgtaggcttgatcaaaatcatagcgccctttcaatggcgtactatcttcactatgttctacccaccaacgccaggttggaaggtagccagaaacagaacggtagttccattccccttctttagaaatcttgccatcgacaaaccagtgtttgccgtggccagtattgaaggaagtattaaaatcagcgtttatgattggtgttttatccactactagattggacatgccgtaccaagattggtctgctggttttcctttggttgggtccccttggaagccagtccagaataaatcttcatgggtatggtaaccttctcccgtctttcctagacccgtaatggtatctggcgcataaagacctagggaaagacgcaacttaccatgctcatctaaaatggcattccagtcgacattagtcttataagaacctcctttttggagctcgagtccagcaagaacatcataaggattccggttaatccatttggctgtactgatggaataatcaacttctgatttgccccagttaaagttagcaaagaaggtatcaactggattttccccattttctgtctgcatgaaattgtagttatattctcccagcgcattctcatggtaacggccatattcataggtcatagcatcataccaggaatacttaatcggatagttcagacttttcgcatattccttggtataaagaaggaaatctctcaattttggacctaatggttctacaagatttccagtcgtttcttggttgataaagtaaccatcaaagccatagtacttagcaagttcgactaatttacgagcgatcgggaaagttttagagccttcactatcttctttcaaggtttctgcaaaatgttcttgatccttgatgctgctagaccagttataaaagattgttccataaataggaacaccatttcggtgggcagcatcgatcacatctgctgatggaaccagcccttcccaaaagaccatggagtccaaatattgccagtaatcaaaagcataggccttaaactcttcccctccgacagacgcatgatccttggctttggagttcatgtttgacagcgcttggatcttcgcttcagggttggcttgttcattaatttgttttccttggaaacgactcgcaagtgggacgcttgctctgttcatatcgtcatccactcgttttcctggttcccacttcaaaagatcgtcccaggtatcgaacttaacttctttgggtcttaattgtttttcttcattggttggtaaatcagccactttttcagcagtagctttcggtttttcagtctctgaaacagctggatgatctgtagttgtcgagctagcttctgtacttgtagggctagcctctggagtgaccgcttctgtggccggttttgcaggatcagctgtaggaagtgccgcatctgcagtatagacgccagcttctctcactagatgattgacctcttcagtcgctactgaagaggtttccaagggttgttcactagtagaaaccgtctcatctgcagagacagcgcctgttcctaaaaatgctaacccaatcaatgcggaacaaactcccacactgaattttcgtatactaaatcgttctttcttttcaaatagatgacctttcatcttgacctccttgtatgttttttctatttcttgagcgatttccattggctcctttctatacgacctgtaatcgctttcatttcgttgtattagaaatctccaatcaagaataggataccttaatctatttagcactgtcaatctattttggcaattcctataatatgatgagaaagccctaaaaaaagtacaaaaaaagaggaggtttccctcctctcatcatacgcatgaattatttagcaatttttgcgaagtattcaagagtacgaacaagttgtgcagtgtaagacatttcgttgtcataccatgaaacaactttaaccaattgtttaccgtcaacgtcaagaactttagtttgagttgcgtcaaacaatgatccgtaagacatacctacaacgtctgaagaaacgattggatcttcagtgtaaccgtatgattcgttagctactgctttcatagctgcatttacttcatcaacagtaacgttcttttcaagaacaactaccaattcagtaactgatccagttggagtaggaacgcgttgtgcagctccgtccaatttaccgttcaattcagggataaccaaaccgattgctttagcagcaccagttgagttaggaacgatgttagcagcaccagcgcgtgcacgacgaaggtcacctttacggtgtggaccgtcaaggatcatttggtcaccagtgtaagcgtggatagtagtcatcaatccttcaacaacaccgaagttatcttgaagagctttagccattggagccaagcagtttgtagtacatgaagcacctgagataactgtttcagtaccatcaagaatatcgtggttagtgttaaatacgactgttttaacatctgatccaccaggagcagtgataacaactttcttagcaccaccagcatgcaagtgtttttcagcagctgctttagtagcaaagaaaccagttgcttcaagaacgatttctacaccgtcgttagcccagtcgatttgttctggatcgcgttcagcagaaactttaacgaatttaccgttaacttcgaatccaccttctttaacttccacagtaccgtcgaaacgaccttgagttgtatcgtatttcaacaagtgtgcaagcataactggatctgtaaggtcgttgatgcgtgtaacttcaacaccttctacgttttggatacgacggaaagcaagacgtccgatacgaccgaaaccgttaataccaactttaactaccattcgtgatttcctccttatgaaaatcaaaaaaattttttgtgaaaagagtaacttgacacagcgccaaacatcttttaacagtctctattatatactttattgcattaaaaagcaactatttccccacgaaaagcaagatttatcatagcttgagaccttttttattaaagtttttcacaaagtcttagtccatggaaatgacgtttcctctaccaccatttaacttctagcctttccagacaaacaaaaacccttccctaaacgggaagagttctcagatttggtaaattaagcttcacctttagcttttttaatgatttcttcttgtactgattttggtacatcttcgtagtggtcaaataccatcatgaaggtaccacgtccttgagttgcagaacgaaggacagttgcgtaaccgaacatttcagcaagtggcacataagcacgaacgatttggcttgcaccgtgtgcttccataccatctacacgtccacgacgagcagttacgtgccccataacatccccaaggttttcttcaggaactgtgatggttacaagcatcattggttcaaggatagctggttgtgcagtcttagcagcttctttaagtgcaagagatgcagcgatcttgaaggcagtttcagatgagtcgacatcgtggtatgaaccatcgtaaagcttagctttcacgtcaaccattgggtaaccagcaagaacaccgttagccatagattcttgaagtcctttttctactgcagggatgaattcacgtggaaccacaccaccgacgatcgcattttcgaactcgaatcctttaccttcttcgtttggagtaaattcgatccaaacatcaccaaactgacctttaccaccagattgacgtttgaagaatccacgtgcttgtgtagaagcgcggaatgtttcacggtaagatacttgaggagcaccaacgttagcttcaaccttgaattcacgtttcatacggtcaacaaggacatccaagtgcaactcacccataccagagataactgtttcaccagtttcagggtttgtttcaacgcggaatgttggatcttcttcagccaatttttgaagggcgatacccatcttgtcttggtctgctttagatttaggctcaaccatcaattggataactggttctggaacttcgattgattcaaggatgatttttgctttttcatctgtcaatgagtcaccagttgtagtatctttcaaaccaacggcagcagcgatatctccagagtaaactgtttcgatttctttacgagtgttggcgtgcatttgaaggatacgtccgatacgttcacgtttacctttagaagtgttcaatacgtatgaacctgagttcaagacacctgagtaaacacggaagaatgtcaagcgacctacgaatgggtcagtcatgatcttgaaggcaagagctgcaaatggctcttcatcagatgctggacgttcttcttcttcatctgtatctgggtttacacccttgattgcagggatatcaagtgggcttggaaggtagtcaaggactgcatccaacatcaattgaacccctttgttcttgaaggcagaaccacaaagtactgggtagaattcaacgttgattgttgctttacggataccagctttcaattcttcgtttgtgatttcttccccttcaaggtatttcatcatcaagtcttcatcagtttcagcaactgcttcaaccaatttttcgcggtattcttgagcttgttcaaggtattcagctggaatatcttcttcaaggatatctgtaccaaggtcgttcgtatagatttcagctttcatcttgatcaagtcaatgattccgcggaagtcatcttcagcaccgattggcaattgaattgggtgagcgtttgcttgaagacggtcatgaagtgtgcttactgagtaaaggaagtcagcaccgattttatccatcttgtttgcgaatacgatacgtggaactccgtattcagttgcttgacgccaaactgtttcagtttgaggctcaacacctgattgtgagtcaagaacggttacagcaccgtccaaaacgcggagtgaacgttgaacttcgatagtgaagtccacgtgtcctggtgtgtcgatgatgtttacacgagtgtctttccattgagctgttgtagcggcagatgtgatagtgataccacgttcttgctcttgctccatccagtccatttgtgacgcaccttcgtgagtttcaccgattttgtgaatcttaccagtgtagtaaaggatacgctcagttgtagttgttttaccagcatcgacgtgagccatgataccgatattacgagttttttcaagtgaaaattcgcgtgccatgaggtttgtttctcctatattttttatttctatattctattataacatgatttaataaaaacggataggcaggacctacccgttctcagtgttttcatgctaagttttggttccaacttgtaagaaaagttgaattgggttcaagagccgacaaagcttaattgaacccgggctaaaagctcggaaaatagataagctttcctagaatcttcgattcttcgtcaagcttcctaattttcagtcgcttttttaacaccctcagtatcttgatcttaccagcggaagtgtgcgaatgcacggttagcttcagccatacggtgagtatcttcacgtttcttaacagctgcaccagtgttgttcgctgcatccaaaatttcttttgcaagacgatcaaccattgtgtgttcaccacgttgacgagcgattgttaccaaccaacgaagtccaagtgttgtacgacgttctggacgaacttcaactggaacttggtagttagaaccaccgacacggcgagcacgtacttcaagtacaggcatgatgttttccatagctgtttcgaatacttcaagagcatcgttcccagtagcttctttaatttgttcgaaggctccgtaaacgattgaagcagctgtaccacgtttaccatcaagcataacgcggttgataagacgagtaactaattgtgaattgtaaagcggatctggcaatacatcgcgtttaggcgcacggtttttacgactcatttctctttatcccctttccttatgcttttggacgtttagtaccgtatttagaacggccttgtttacgatcgtttacacctgcagtatcaagtgctccacggacgatatggtaacgtacccctggaaggtcttttacacgtccaccacgaagaagaaccacgctgtgttcttgcaagttgtgtccgatacctgggatataagcagtaacttcgatcaagttgctcaaacgtacacgggcaaatttacgaagggcagagttaggttttttaggtgtcattgttccaacacgagttgcaacaccacgtttttgtggtgaagaaacgtttgtttgaacttttttatgactgttgtaaccaacgttcaaagctggtgatttagatttttctacttttgatttacgcggtttgcgaaccaattggttaattgtaggcatctacattctcctgtgaatttttttatttttggtgatgatacacttggtgacagctaccatctgtgtgtacttttgcaacatttgtcagcacgtccctgtacactcttgagagaccaaaagtaaaaagtaccgtctattattataacatgacggcactttgtttgcaagatcttttttctgttttttcaagaagtctaaaagttaaactattgagctgtttgagccggagtttgcgtccctgcatctacagtgggtgtatattgttgttgctgttgtgattggattgtcgcgtctgtcgtgttcgctcctgtatctgtatttgaatctgtttgattctgatgaacagctgttgtgtcttcctcataggttaaaccataatagttagcaatgtattggatacgagcttctagtgattgtttttgagttgcatcattcactttcttaacagctgtttgcgcagcagttacagattcttgactcggatttttctccatttggtctactgctttctctgcagcttcaatatttttcttttcttccttcttttctttttcttcctttgtttcctttttcactggaagagcccctgtctttttagcgggttggatctctgtcgttacttgggctgccgtattctttttcactgtatacaaaccagctactaaaataaaggataaggctaaaacagtcactaagcgaatccacaaaggactgttatcaaatcgatctaaaattcttttcactttttgatcctcctttgtatcctttagtcaaagatatttccaacttcaacattcaatttattttctttcacatcaatattggtcactcgtaataaggatttgtgttcaaagaattcgcgatctgttgaagcattatcagcaaaaacagctacccctgctaattccgaatcgaattcagccaaaagactgaccatcccgttgatcgttccaccgccttttaggaaatcatccacaatcaaaacccgacttcctgcttttagactacgttttgaaaggaacattttttcaatacggtcgccactagatcctgaaacatagttaacactgacggttgatccttctgtgatttttaaatcacggcggacaataacaaaaggaacattcaagacgtttgccactgcattggctagaggaactcccttggtcgctacagtcatgacagcatcaatcttcttattacggaaggctttagcaatgatacggccgatacgattcaaaatctttggattgcttaaaagatcagataagtaaatgtaacccccaggaagaatacggtcactttcagacaattgcttgcagaggtcttgaacgatttcttttgattcctcgtctgagatagagggcgtaaaaacaacgcctcctccagctcctgtgatggtttcaatatttccaatttccatctcttcaaaagcccgcttaataatcacgatatcttctgagatggaagatttagcagactcatacctttctgcaaaggtattgaggctggtcaattcatagggatggttgatcaagtaattagaaattacaaccatccgttcacttcttcttaatttcattttctcaccatgtagttttttctatcattataccataagaagcgaaaaaaacgaacattctgatttacagaaggccgtttttccctaatttttttcttttttttggaatagtttccgtatttatctctgtttttactgatcgatattcggtttatagaaagatcggttttccatagcgaaaatcttgttggtcatctcgccaggaccaaccaaacctagagctgttgtcatcatcatcatttctgcatccaaattgtcgatcatatgaataatctctgcttccatgatctttggacgaacaggactaccgtattcgagtaatccatggtgactcaagatcacatggcgaaggacaattacctcttctttttggtcatcaatcttcaagtcttgcaagactttggtgatttcttcatctatcaaagcaatgtgaccaatgagattgccccgaacagtgtattctgtattttcaggacccgtcaactcgatcactttagccaaatcgtgtaacataatccctgcaaagagcaaactcttattcaattgaggatagatatcgccgatactatctgccaagcggaccatggtcgctgtatgataagcgagacctgcttcaaaggcatgatggttcgtcttagcagctggatagctataaaactctttctcatattttccatagagggcacggacaatccgttgccaaactggattttcaattttgaaaatcatgttcgacaggtattcatgcaattccttgggatctactggtggtttttccttgaagtctgctggattgttgggctctcctgcttgtggcaaacgcatattcaattgattaacttgtggagtattattgtagacctcccgacggccagccatatggaccacgcgcccagctgtaaagctctctacattgtgtggttgggcgtcccatagtttgccttcgatcgtgccggtctcatcctgaaaaacaaaggctagatagttcttcccagcccgcgtttgacgcacttctgctgacttgatcaaatagaatccttcgaacaattcatcttttttcatttggttaattttgaccatcatcttctccatcttctatatatacatctagtcccagcaggtcctcatcgctttcgatttggcggagtgtccgctcgatggcactggtccgtctggttagcaaatcatcaatattattggaagcattctttaaatggcgttgagtcttggccagaatccctccaaacttatggaattctgatttgaccgatcccaacaccttgctaatgtcatctgcactcttttggatgttgagcgttttaaagccaacagacaaggagttcaagagggctgatagcgtacttggcccagccactaaaatttgttcgtcccgacgcaagcgatcgaagaattctggattgcgaaccacttcggaatagaggccttcagttggcaaaaagagaattccgaaattcgttgtcgctggtggaaagaggtatttttgttggatatccttagcaaaacgcttgatactagcaagaagagtcttgcggtaacgctcaatttcctctttctctcctgattcataagcttcttccagacgatagtagtcttccagtgggaatttagagtcaataggcatatagactggctcctctccttgccctggaagcttaatggcatattccacgcgctcactggattgaggaacggtgacaaactctcgctcatactgggctggggtcaagatatcttcaatgatttggcccagttgcaattcgcccataatcccacgcgtcttggtattggagagaactttattaagggttccgacatcccgcgccaccgtctgcatttctcccagccctttgttgaccgactccaattgttttgaaaccgtctcaaaggaggtctgcaaacggtgttgcaaggttttctccaatttttcttctaccgtttggcgcatctgttctagccgcacttcattggactcttggatctggcgcatgcgctcatctgttttgtcccgatttttagtaaagtgctcattcatctcagcgcgcagagccgtcgtctgctggtggatctccactcgcatctcggtcaagcgatctgtcagggcgatctctaactgctgattggtaatctggcttgcttgtctttctttttcaaaacgatagtccaactggtctgtcaaatgatcctcgtggtcttccagcatctctcgtaaagccggtcttgtatcatctgaccgttgcaagaaatagatgaggaggcccagattgagcaggccaatcagaagcagaatgatattcatattaacctctgtctttactataaacaatgacaagatagccacgatcaagactcacttgaatcggttgatccaaaaattcattggagccatacatggccttcaaaaaataattctcctgatggagcggatacttggcccctgtgatctctaagtggccttctccgacaggcataaaaccaacataggacatggctggatccggctgaatctcatggcaaccagctggtctgtagatcaagcgattttgaccatcgactaattgaatctgctccatatagggagttaggtctggatcggtcggcaaaaagatattggacaagaagtgatccaagcgaccgccaaaagcaccataaacggtgacagcagcctctggataggcctcaaagaccgctttcaaggccaattccaaatccgtatcgttcttttcagggacggattgaacaacttgcttggcttgggtacggatcttattcaaatcggtctcagagacagaatcgaaatcccccacagctatatctaaaggcagaccttgttccagtaacttcaaacagccaccatcaacgcctacataagcgtcatgatctcttggcaagagcgtgctgtcacctcctgccagtattgcaatgttacccatttacagcatctcggagcgtttgtacgcgctcattgacatctccattaaagacataagagcctgctacaaagacattggccccggcttctttggcttgcgaaatactttggtcatcaattccaccatccacttcgatatcaaagtctaagcctttttcttcacgaagagcggctaattcgcgcaccttgtccatggtttcaggcaagaaggcttggccaccgaatcctggattaacggtcataaccaagacttgatccaccaagttcaagacatgtttgatactgtctacaggagtccctgggttgatcacgacactagccttcacacccgcttgacgaattttttgaagagctccgtgaatatggggagtagcttccacatggatgctgatgatatcagctcctgcacgggcaaattcttcgatatggtgttcgggattggtgaccatcaagtggcaatcaaagaccaacttgctatgtggacgcatgctctctacgacaccagccccgaagctaatattaggcacaaaatggccatccatgacatcgatatgggcatagtcagctccagctgcttctaagcgtttcaattcactttcaaaattggcataatcggcactcaaaattgagggggctaatttcattgttttcattcttgtattgtctcctattttggcatttttttcgaaacttttttataggtttcgcgacgattttcaatttcacttaaaaattgcaagtaatcctcataacggaaagtcgcaatttcctctctttcaacggctggtttcaccgcacaagcgggctcatgcgtgtgggcacaggtacgaaatttacaagagtggctcacgtctgcgatctctgggaaggcttgatttaagtcttcactggtcgtcacttcataatcaagggaggagaagccaggcgtatctgcgatctttcctccatttaaatggtaaaagctgacagctcgagtcgtgtgtcgaccgcgccccagactatctgaaatctcacccgtttcaagctccagatccggagcgattttattgagcaaggtcgattttcctacaccggtctgtcccataaagactgtggtttgattggtcaaaaggggcaagagttcctcaatcgacaagacaaaatcatagccaatagcctggtagattccttggtagtagtggatgtcttccatatcttctaacaagtccagttttgaaatatagacaatgggatgaatccccttatgctccaaaagaaccagaaaacgatctaaaagattggcgttgaaatccggttccttagctgacataatcactactgcctgatcaatattgacaataggagggcgcacgaggctgttttttcgaggcgcaatgctcaaaatgtagccttctgaattctcttcagcagagaactccacctgatcccccacgtaaggagtctgtcctttttttctaaaatttccacgagcccgtgtctggtaaatgtgcccgtctgactccacgtagtagaagccagccaaggccttgacgatggttccttgcaaatcgcactcctttgagtttaatactcctattataccaaaaaatgagaaataaggctggaatgcttgataagaaaatctggaactagtttcagcaatttttttaaggataataaggagagaacttgcaaccgcttccaaatttaggtataataaatgtgaaaaacattcataaataagttgcctgtgggaagctagagacaagcatgatagaaaggaagtgaagaccagaaacacaccttgtttcaacgctcacttggctgaacaaaaaatttttctttgttcttcgtttttagatggaggttctttatgagtctttcttttctttctaagcaaaatcccttgattgacaatatcaaaaagggaaaatttctgacaccttggtttttggctccgttcatcttgtattacatcacggagtatatgtcacctgttagtacggcatcgactagcttctttctcaataagcaacactggatcccagactggtggaatatccttgacctttggtccttcctctataccatcatcgccttcttcctttgggttcgcttgattgaaaagcgtcctattcgaaccatgggattttccaaaggaaatgggctttccgagtttgcaaaaggttgccttgtgggaggcatcatgatcacaacagtcttgatcgtctttttagtcacaggaaatgccacattccatcgcattcaatttagtatgccatttcttgtatcttggattttggtcttgatcggctatattttccaaactgcggcagaagaaatttatatccgtggttggttgattccaactatctcctaccataccaatgcccttctagctatcctgatctcagctactatgttctcctacttccatatgaataacaacggtgcttcttggttctctactgttcatctcttcttctttggggtctttacagcagtctatgccctaaaacgcgggaatatttggggaccttgtggcttccactttgcctggaatttcctgatgggaaatgtctatggttttcatgtcagtggctttgacagcgaatcatccttgatgtacttcacaacttcaaatcacaccttgatcaccggtggtgaatttggtcctgaagggggtatcccgggattagtggtctgcatcttagctcttttatgggccatctttatcctcaaagatacctccaaggagcaagatagcctatatcctgcgccattgaaatgatctattgataaaggaacaggagccacctgtaggctccctgttcctttttttccttggcatttttcctaaaaagtgtataatagaactatgcggaggtggtggaacggcagacacgcatgcttcaggcgcatgtgccctttcgggcgtgagggttcaaatccctttctccgcatcttggaaaggtggcccagctcggtacggcaccggactcgaaatccggcaagtggattttattcacgcgcgggttcaaatcccgtcctttccttcaacaataaacaagacatgagctacgaagctcatgtcttttctgttattttattcctgcttctagaaggccatctgctaggcgagcgaagtcttctaagctaagagcttctcctcgtacagaaggttgcaggcctgcagcttggattcctgcttctagttttgctttgatttcttcggtcttgccaaagcgactggtcaagttgttccaaagcgtcttccggcggtggacaaagctagccttgctgacagagaagaagaaatcttcatcctcgactgctactgctggttcttcgcgacggaccatcttcaaaatggcagagtcgacatttggtgctggcacaaagacggtgcgaggcacaataaaggctaccttagccgtcatatagtattggactgcaatggataaagaaccataagccttggtgttgggctcggctgaaatgcggtctgccacttccttttgcatcatgaccacaaattcttggaaaggaatcttagattcgatcaagtgcatgaggattggagtcgtaatgtagtaaggaaggttagccactaccttgatcggaaggtctggatttttaaactctgcgatgtactggttgaggtctaccttgaggatgtcttggttgacaactgtgacattgtcaaaatctcgcaaggtatccgctaagataggaaccaagcggtcatcaatctcaaaggccatgacttctgcggcattttctgccaaaaactcagtcaaagctccaatcccgggaccaatttcgatgacattgacctgcttatcaatctctgccgtatccacaattttttgaaggatgttggtatcggtcaagaagttctgaccgaaggattttttaaaggtaaaaccgtgacgctccagcactgccttggtcacgctataatctgcaattctcattttttctcttttctaatcagtttaagggtaaaggatcccctctacttccgtcttaataacgggccatcgcctcttcgacttgggccaaacaaattccaaacaactccaagcgtttgatcaattgcttgccattgcagtagccgatgcgcaaggcttctcctagatattcccgtcgtttgcgactatcgttgcccatcaacagaccaagacgcatcaaatcagtctttgtgatatcaaagaaattctcatcttcataggagcccacaagtccagctagggctttttctaagtcttcaaaactggcatgctccactcccaaggaacgccccttagtcttggatttggggactgcttcgccacgatttaaaaaggcatgcttggcctggggcacctcttgcataatgatcttgcgaattcgctcgccattatagtctggatcggtaaagacaatgaccccacgcaactcttgcaaggtagcaattcgttccaagtcatcttgatcgatcgcagaacctcgcgtttcataggtatccacctcataaaaacgacggagattggctgtgtcgtccttgccctccacgacaatcacttctggtatttttcttttctcagtcaaggccaaatacctttcttgcattgtcataggttgcctgagccacttcttttgttgttaagccacgtagttctgcaataaaatctaccacataacgagtgtaggctgttttattttcccgaccacgtttgggaactggtgccaggtaaggggcgtctgtttcaaccaagatcttctcgagcggaaggccagctgccgcttcttggacatctgttgccttcttaaacgtcactactccagaaaaggagatcatcattcccagatccatgaagcgtttggcttcttctagacttcctgagaaagaatgcatgatcccaccgcgaggaccgactccttcactcttgatgatggcataagtatcttctaaagcatcgcgtgtatgcaccacaaaggggaggtccaagtccttagacaattgaatctgacgacgaaaaaccttttcttggacatcttttggtgccgtcatccagtggtaatccagaccgatttctccgagtgcgacaactttgggatgtttcaactgttcaagtaaataggcctccacttcaggactataatcgcctgcctcagtggggtgccaacccagcgtgagatagagttctgggtgctggtctgccaaggctattcctcgctcaatcgtcggtttgtcaaaaccaacgatattatgggctacaacgcccatttccttggccaaatcgagctcttcttgttcttttcctgcgaattcttccacattgagatgggtgtgggtatcaaaaatctgcatgatcttccttttcttccgagtttttcttctttctattatagcagaaagcgcctctaaattcactttcggacaaaacaaaaaccagtagtctcgagtttctactggtttttaggtttttatctgaattacgcagccaaaactttgcgtcctttacgacgacgagctgccaatacgcgacgaccgtttttagttgacatacggttacggaatccgtgtttgcgcgcacgacgaagtttacttggttgataagtacgtttcacgatgaatacctcctcatagattttgtattcgtttagccggctagttgtgatcagttactaaacatactttactattctatcggattccactctatttgtcaatagctatggcaaaaatgttgcaaatacaggtcggagaaaacctttctacatctgacgggttgccaagtaatagggttccagagccagtagcgccctttgcaactgatccaggatatcctcaagagaatcttcctcaactagagaaatatcgtatttgacgaggaccttacgaaccgccccttctgctactgcttgcaacagatcatggcgatttttttctgttccttctaccctttgactctctccatttttctggacgaaataataaactgactgagtgatgggaagggtgagaaccatgtgttgtttttgaaggctctgctcatctttttttcgctcgataaaactcacctctaaggaaactccaaaatcaactacatctccatagagcctcaaggcaaacataggttctgccatcgtcccttctccttttagataggcccaaaaatgaggccgcaagacctgggcctggttcatccattggctggtccgatcctgctccaagtaagggtgacactgctgaaaggccgagactaaatcggtgaattccttacgagccgcttgagctagggcacgatactgctccatctccgaggctagcaccccagcctttgctggggcctggtagtggattccttgaagctttaaaaactctcgaatcgctacaaatgccatttgcttcctttctaaacctaaaaaaggagagatcggctcaatcccgtctcccccttatgggaaataatagctagattatccttcgatgtctaccaccacgtaacggtttggttcttccccttcagagtagctagtgactccttccatcttagagacgatccggtgaatgattttgcgttcactgtttgacatcggatctgtctgttgggcttgcccatcttcgagggcacgtgttgccaacttctgagcatagctttgaagaacttctgcccggtgttctacatagtcattaacattaatggtaatgtaaaaattctttgagtagcggttatagaggtaattttgcgccaagagttgaagagccttcaagacttttccatgataaccaatcacgcgcccaggctcattggtatcaatttgcatattgaccgtacggcggttgtgactgcttgaaatggttgcatcgacatccatttcatcaaccactatttgaacataggctgtcacatcagctacgacttcttcgatattgtagttttcctctacctcgataccaaggtttgagaaatcagactcgcttgattcttttatcgctggttctttgactttctcaaggatatgctcatgccctttttcttcaagaaccgtattcgcttctttttcatgtttgagaatctccgtcttgatttcttcagagacgacttccccctctttttcaaccttcttaatcgcagcaaccacgcgcccaaggtcaactgttgcttcgctcacggtcttgaccggctcgttttgtgcattaatttcgtccggtacgcctttgacagctttttgattggctttgacgaccgttgtttctgcaatcggctcaatctctacttgggctggcttcttcccaaacaagccaagaaaacctttcttctcacgtgctacaactgtaatatgtgccttcatacggggaatatctaaatcgttcaggcctttttgaatcgcttcttcaacagttgctccagtatataggaccatatgtccacctctttcttattttttctttttctgtgctttgtttagggcacggcgtttttgtttttccatgtcgcgcgaagcttgctcttttgcttcacgctctgcaataatcttgaaggggttgttcaagagataggtttgcccgacttgataagcattggaagtcacccagtatagtgcgaccccgctggctgagaacaaggcaaagaagaagatcatcacaggcatcacatacatcatagttgttgcacttccattgcgctctggcatggctttattggtcaaccaactactgaaaaatgtgaagagagctgcaaggactggcaaaatataagtcgggtcgatcgcgccaaggtccaaccagaggaagtgaccgactttaaggaattcaacacggctcagtgcttggaacaaggccatcaagaccggcatctggattaagagaggaaggaaggctgaagacgttttgacgcctttttctttgtaaagggctcgcatctcttcagaaagcttggttcggctatcaagatccttcccaggatacttagcttgcaattccttgagtaagggttgaatttcctgcattttgcgggttgaattcatttgatattggaagagcggcaaaaggaccgttcggatgacaatggtaaagacgataatccctacaccgatattaccgccaaatgacaagaagcggatggcttctgcaaagaagtagacgaagcgttcccaaccacctgtcgactgagctgtcacttgagaggttccacaagctgtcaagaccaataaggccgctcctaataatccagttaacttcagtttctttttcactttattccctttcttggtagacatgcgctaattttaagacatgtacaagatttttctctacttgatgaaagtcgagctcctccactcctttacgagcaataacaacaaaatcatcggtcgtaaggaaggcttggtgtttgatcaaaacatggcgaatcaaacgtttgatgcgatttctggtcacagcatttcccagtttcttactaacagatagaccgactcgaaaatgtggttggtctttgcgcaagcggtaaacaacgaatttccgattggcaacattttgaccacttttaaaaatagcattaaaatctttgtcacgtttgacgcggtagctttttttcaaacctcaactccctcttttaaatttattctattataccatattttcaaaaaaaaccaatctcactcaggaaatcggttattacttgaatacagataaaagtaaaggcaaggtgtagtagagattgagcaagatatgagccaaaataggagaaaggagtgtcttactcctataatacaggatcccaaaaatcacactcggcaggagatagatgatacaagcccccagcgaaaagggattgtggagaaaatgtaggccactgtagatgagggctggaagccaaatctcagcatagagtttccagcctttgaagtaggcattcaccaaggctccacgaaagatcagctcttctgtcaccggccggataataaccattgcaatcactaggataagcactcctgtggggctaatttcccgtggaaacagactcaaaacggctgcccgtccttgaacaaaaccactgatgaagtagtccaaccagtaaaccaaacaggccgcaaaaacggcttctatcagagcttgaagagggttcttccccagcttaaattgcgcttttttagaaaaacggtagaccaaaaatcctgtaaagactgcatagaggccttctaggccaaataaggtccaataatagctattggcgcttgctacattattggagacgtactggcccaaagggcgaaattggggccgaacataaaaataaaacaagagcagaaaaaggggataaagcagcgagatctttcctttaatgaatttcatagatacctttcctatagagtatgacaaatcgtatagtgcatcttaccataatcgtgacaaggtttcaatgaaaaaggatgacttcctactccctgagatagaccacataacctcctaaaacagcgactaaaatcaagagacaaagaagagtttccatccatacgagagctgtcaagaaaggccactgcaacaagccttgggccattttcaaagaggtcgctgtgatgaccgttggaaaggtcagggctgaaaaagcaggttgaaaaccttctttgatcattctcggtagacgcgtcaaaacaaagaaataaaaaccttgtgaggcaactaccatgatcagtaagaaccagacaggaaggctcgctccacccacacgaaccagagctgctaaaagaagggaaaatggagcgcaatagatgccttcttggcccaacagatgactgggcaagggggacttcttcaaatcatgatagataaggggataaagaagaaaggtcaaaccaaaaccaatcactaaagcgagataagcaatctctcttattcctacaactggataagtcaaggctgctactgcaatgcccacatagagaacggtccaacttggagtggcattggctcttggtcgcgctaggatatgggtcttggtaaaatagagaattaagcccagatccaagagaaaggcagaccaccagaccaactgtgatagacctccaaaggcgggaaagaggcgcaaaagataggtggatagaatcatccctgccatgggaaaagtcgccatcccagataaaagggctggttgttggaattctatcttggtttcttgccagcgaatcgcatggtaaactacaaagaaaaaccagaagaacaaacctgtcagactaaaggcgtgggcaaagaaaggtagcgagtctgcaagaaggttgccagcgccaaccagtcctaacagacagcctgaaaatactaaggggatctttttcatcgggagctccaatcatgttgtcgctttcagtataccataaaaacagagggaacagcatcaaaaaagaagtcatacaaatatgtttttcccaaaaaaagaggctgggacaaaagtcctagcctctcaattatttttggattgtcgagcaagacgcagtggttgagtgggctctactacgctgatttcatcagcttttacagcccgcggaggtgggacgacgaaatcgaattctaacgaattaccgatttctgtcccactctctttttggagggccatacaatatccgacttcttttttagtatcggtgatttttctacatcattgattacattcgatgctaatggaaggaggaattagcccgtagaaacagcataaattcctccttccttttaatcattcagcttgcatgcctatttcttcttgcaaacgagctcggaaaacagctggttcaatgctacttgattgggtaatttgctgaaccacagcttctttgtatgtctctacagattggtagatttcccggatacgcgctacaaagtcagcttcctttccttgttcaaagatattttcttgcgcaatataacgtcgatcatgtaaagtgtgtgaaaagcctagaataatttgctggtgttcaaatgctttacgaacaataccttgtacctcgccatagtggttaatatccaaataaatacttgactgaaccaataattctttgattcgatcttgactaatattttggtataaaacaacgttaggataccggaccattgaagaaagtactggagacatttccgttaacgctgcaattctaaaagtaacatccggcaacttctctactagctccgttagagcctcaatttgatcagaattagtcaagacaaaggtatccttacgaatatcttctttaacctgaaaatcataaatgtagcccaatggcttaaagaatctgtgttgttctgatgatgttaattctaaagcacgttggtaggtgctattctgaggaatcacaattttattggtacgcaaatttggagtagataaaataaactgcatatttccaggcaattcatcataaagaggttcctgccaaattaagagatcatgcccctcaacacctttatttcccaagtgtagactgacattgaaggagagggccagtgtattatagatcactttatctagattaaaacctctatattctagatagaacatgaaataatctaagcgactcttgaaaatttgcataggggaattaggcaaggttaagatcaaatcacctgtttgatgattttctgtcaggcgctcaatcgttccctccaaataagtggtcactaagggttgtccttgaccatcacaagtcgtaacagcaatcttgcgaccgtattgatcatagcgctcgatcatcacaacttgactgttatcatccaaccactctacacgttcaacaatacgtttataagaagctaaatgataataaatacgagccttttcctgaccataataagtcactttccccatattgttatcaccagaaatttcccaaaaatctgggactaggacttcattaaaataacgtcctcgtttttcaccttctggctgtcctaagaaataaaggaaaggagactctacaccgtctggcaagaaaccatctggctctagaacgactgtcggatgatgaaaaccagactcctgcatagaatgaagcaaatcttggctctcacgagaataactatcaaatacattcagcatgtgtcacctcttctatcaattgagaccaagcttcttctactcggctggtcaaaaagtcttccgcacgcgtataagatgcttggcgcatattcgctagctcttcattttggtagagcaaaacaatcttttcagcataggaagaagcaatatgatccaccacttgatcagaagaagatggaatcagatagccgtttttaccttctgtgacaaaggtttggttgccataaggaacatcaaaaccgataatcggaagaccagaaccgatggcctccatcaaagtcaaaccaaagccttcgctagtcgatgcagataggtaaacttcatagttcttataaatctcttcaagattggcatgtcctttgagatggatataatctgtcgcccccaattcatcgataagagagcgcaacttcccctcttctccaccattgccatagatatcaaaggataactccggtaactcttttttggcacagaccactgctcggatcaaccaatcaatatgtttctcagtagctaagcgagaggcggtaatcatagaaaatggggtgcgattttcattttgtggcaggcttgcaaggctaccaactggaatggtatagatagctggccgatggttggtgtatttggcaaactgctctgccaagatttctttttggcggtcagtagcgacaataaagaagtccaccttgtctgcattggtaaattggtagtcgtaatagttattccacaggatgtactgatcatcaacattattggcactaaaatgctctgcatgaacaaccacacctaggcgagctttttgggcttcttcaaagataggctgtccgatattagtttcccgatctaaaataaccagatcttgtttggtcaattgaagggtctgcataaagtaacggatcaattcttgccgaccaactaggaaacgatctggaaaacggtagacttcacgaccatccgccatttgcatgctgtaagcaacacttccatcttcattataaaaacaacgctcaatcaaagtagcttgattattcttaggaataaagtactcggtacagtaacgagtgtaggagaaataatcctttctcaccaagatccctctggatacatactcgcatcgttctacatagggactgttttcttctcgcaggtagcaggtcaaaaagttgtcttggtcctcataaaagaaacgcttgatcttaccgtcaacttcttcacgagtgggttttccagcaaatcctgctaagacctgatcaatcgtataggtcgtaggtgctatctttatatccgtgaaatagctgtagagccagatgatttcatcatttttaaaaccgatattttctgttagatgctggatattatcggctaggatcatatccataaacacaaatttggctggttcatggatattgcgtaacaactgggcacgataggcctgggcatactcgacaccactgctggcccaaccgattcccaggttgatattatatactgtcataatgtcctcttttgtggaaaatgcaaggcgcttttccttttttaatttttacattacagaatgaggagggagaaacatgccccaaccacattttaaccgattagaaaaaactaatcttttccaattagtacgactaatattataacacacaatttaccattaaacactggatgaatacttcaaaaaacaacgtcctactacctcgaaatacttgttcttcaattattattttaaaagtttctttttatcatatccattaaatataaaaagggagtgagactgaacgaatttaaactaaattcgttcgtagtcccacccctttaaaggttatatagcataagattatagctaaaagaaactttctttataagttctcaccactacctcgaagcagtgtttcaagcacttataactattagtcatcgaaggttggacactttgtttccaacctctctcgtactgaagaataaaggtgaacaaatttcactactgtccagttactccatcttcatcctcatcttttcttcttttagcaacaactcccaagccgactaaacctgttagtagaccgagtcccagggcagctgtattagctgactgatcacctgtttgtggcaatttcgcatgtgtctctgacgactgtgctgatgctgaagctgaaatgcttgtacttagggaagcgctggtacttgcagactcgctcgcacttgtcgatgcactttgtgaagctgaagtacttgcggattctgacgcgctggttgatgcactttgtgaggctgatgtacttgcagattctgaggcactcgttgagacactttgcgatgcagagatgctctcagatacagacacactaatagaatccgagataataacactattaatatcaatgctatcaagagagtggatcgcaggctctcccttacttgtaatgacagagtttgatgcactggttgatgcactcaatgaagctgaagtacttgctgattctgatgcactcgttgaagcactttgtgacgcagatgtgcttgcggattcgctcgcacttgtcgaagcactttgtgaggcagacgtacttgctgattcgctggcgcttgtcgatgcactttgcgatgctgaggtacttgctgactcacttgcactggttgaagcgctcattgacgctgaagtacttgctgactctgacgcactggttgatgcactttgcgatgcgcttgtgcttgctgattcgctggcacttgttgaggcactttgggacgcacttgtacttgcggattctgaggcactcgttgaggcactttgcgatgcgcttgtgcttgctgattcgctggcacttgttgaggcactttgggacgcacttgtacttgcggattctgaggcactcgttgaggcactttgtgaagccgaggtacttgctgattcgctggcacttgttgaagcactttgcgatgcacttgtacttgctgactctgatgcacttgttgaagcgctttgcgatgcagatgtacttgcggattctgacgcacttgttgaagcactttgtgaagctgaagtacttgcggattcagacgcgcttgttgacgcgctttgtgacgctgaagtacttgcggattcgcttgcactggttgaagcactcattgatgcagacgtgcttgcggattctgacgcgctggttgaagcactcattgatgcacttgtgcttgctgactctgatgcacttgttgaagcactttgtgatgcacttgtgcttgctgactctgacgcacttgttgaagcactttgtgaggcagacgtacttgcggattcgctggcacttgttgaagcactttgcgacgctgaagtacttgctgattcgctggcacttgttgaggcactttgtgacgcagacgtacttgccgattcgctcgcactggttgacgcactttgtgatgcgctagtacttgctgactcacttgcactagttgaagcactcattgatgcagacgtgcttgcggattcgctcgcactggttgatgcactttgtgaggcacttgtacttgctgattcgctggcacttgttgatgcactttgtgaagctgaggtacttgctgactcacttgcgcttgtcgaagcactttgcgatgcgctagtacttgcagattctgacgcgctggttgatgcactttgtgaagcacttgtacttgcggattcgctggcacttgttgaggcactttgtgacgcacttgtacttgcggactctgatgcactggttgatgcactttgcgatgcagatgtacttgctgactcacttgcactcgttgaagcactcattgacgctgatgtacttgctgattctgacgcactggttgatgcactttgcgatgctgacgtacttgctgattctgacgcacttgtcgaagcactttgtgacgctgacgtacttgctgattcgctcgcactggttgatgcgctttgggatgcacttgtgcttgcagattctgatgcgctggttgatgcactttgcgatgcacttgtgcttgcggattcgctggcgcttgttgaagcactttgtgacgctgaggtacttgcggattcgctagcacttgtcgatgcactttgtgaggctgatgtacttgctgattcacttgcactggttgatgcactttgtgatgtggatgtgcttgctgactcacttgcactggttgaagcactcattgaggcagacgtgcttgctgactctgacgcacttgttgatgcgctttgcgatgcgctagtacttgcggattcgctggcgctggttgatgcactttgcgatgctgatgtgcttgcggattcacttgcacttgtcgaagcactttgggatgcgctagtacttgctgactcagatgcgctggttgaagcactttgggatgcgctagtacttgcggattcgctcgcactggttgaagcgctttgtgatgcacttgtgcttgctgactctgacgcacttgttgaagcactttgtgaggcagacgtacttgcggattcgctggcacttgttgaagcactttgcgacgctgaagtacttgcggattctgacgcactcgttgaggcactttgcgatgcgctagtacttgctgattcgctggcacttgtcgatgcactttgtgacgcagacgtgcttgctgactctgacgcgctggttgatgcgctttgtgacgctgaagtacttgctgattcgctggcacttgttgaagcgctttgcgatgcagatgtacttgcagattcgctggcgctggttgaagcactttgcgatgcacttgtacttgctgactctgacgcgctggttgatgcgctttgcgatgcagatgtgcttgctgattcgctcgcactggttgatgcactcattgatgcggaggtgcttgctgactcactggcactggttgatgcactcattgatgcggaggtgcttgctgactcactggcactggttgatgcactttgtgaggcagacgtacttgctgactcacttgcactggttgaagcactttgtgaggcacttgtgcttgctgattcgctggcacttgttgaagcactcattgatgcacttgtgcttgcggattcgctcgcactggttgatgcactttgtgaggcagacgtacttgctgactcacttgcactggttgaagcactttgtgaggcacttgtgcttgctgattcgctggcacttgttgaagcactcattgatgcacttgtgcttgcggattcgctcgcactggttgatgcactttgtgacgcagatgtacttgctgattctgacgcgctggttgaagcactttgcgatgcgcttgtgcttgctgattcgctcgcactggttgatgcactttgcgatgcgcttgtgcttgctgattcgcttgcacttgttgaggcactttgggatgcggacgtacttgctgattcgctcgcactggttgaggcactttgtgatgcagacgtacttgcagactctgatgcgctggttgaggcgctttgtgatgcagatgtgcttgctgactcacttgcgctggttgatgcactttgtgatgcacttgtgcttgctgattctgatgcacttgttgatgcactttgtgacgcagatgtacttgctgattctgacgcgctggttgaagcactttgcgatgcgcttgtgcttgctgattcgctcgcactggttgatgcactttgcgatgcgcttgtgcttgctgattcgcttgcacttgttgaggcactttgggatgcggacgtacttgctgattcgctcgcactggttgaggcactttgtgatgcagacgtacttgcagactctgatgcgctggttgaggcgctttgtgatgcagatgtgcttgctgattcgctggcgcttgtcgaagtactcatcgatgctgatgtgcttgcggattcgctcgcacttgttgaagcgctttgcgatgctgaggtacttgctgactcagacgcgctggttgacgcactttgtgatgcacttgtacttgcggattctgatgcgctagttgaggcactttgtgatgcacttgtacttgcggattctgacgcgctagttgaggcactttgcgatgcggatgtacttgctgattcgctcgcactggttgacgcactttgtgaggcagacgtacttgctgattcgcttgcacttgttgaagcactttgtgaagctgatgtacttgctgattctgacgcgctggttgatgcactttgtgatgcacttgtacttgccgactctgatgcactggttgaagcactttgcgatgcgcttgtgcttgctgattcgcttgcactggttgaggcactttgtgacgcagacgtacttgccgattcgctggcacttgttgaagcactttgtgaagcagatgtacttgctgactctgacgcactggttgaggcactttgtgacgcagacgtacttgccgattcgctcgcactggttgacgcactttgtgatgcgctagtacttgctgactctgacgcgctggttgacgcgctttgagaagctgaagtacttgcggactctgatgcactggttgaagcactttgcgatgcacttgtacttgcagattctgacgcactcgttgaagcgctttgtgaggcagatgtacttgctgattctgacgcgctggttgacgcgctttgggatgcacttgtgcttgctgactctgacgcgctggttgaagcgctttgtgaggcagacgtacttgcggattctgaagcgcttgttgaggcactttgcgatgcagacgtacttgctgactcacttgcacttgttgaagcactttgtgaagctgatgtgcttgctgactcacttgcgcttgtcgaagcactttgtgatgcacttgtgcttgtggattcagacgcgctggttgaggcgctttgtgaagctgatgtacttgccgaatcacttgcacttgttgaagcactttgtgaagctgaggtgctagctgactctgatgcgctcgttgaggcactttgcgatgcgcttgtgcttgcggattcgctcgcgcttgttgacgcgctttgtgaagctgatgtacttgcagattctgacgcactcgttgaagcactttgtgaggctgatgtacttgctgattcgctcgcactggttgatgcactttgcgatgcagacgtacttgctgactcacttgcgctggttgaggcactttgtgaagcagacgtacttgctgactcacttgcgctggttgaagcgctttgtgaggctgaggtacttgctgacgctgaagcgctcgttgaagcactcattgatgcacttgtacttgcagattctgatgcgctggttgaggcactttgtgaagcagatgtacttgctgactcacttgcgctggttgaagcgctttgggaagctgatgtgcttgcggactcacttgcacttgttgaagcactttgtgatgcgctggtacttgctgattcgctggcacttgttgaagcgctcattgacgctgaagtacttgcggattcactggcacttgtcgatgcggacgcacttgcggattctaatgcactcgttgaagcgctttgtgaggcagacgtacttgctgattctgatgcacttgttgatgcgctttgcgatgcagacgtacttgctgattctgatgcgcttgttgaagcactttgtgaagccgacgtacttgcggattcgctggcgctggttgatgcactttgcgatgcgctagtacttgcggactctgatgcacttgttgaagcgctttgcgatgcactagtacttgctgactctgatgcactggttgaagcgctttgtgatgcgctagtacttgctgattcagacgcactggttgaagtactttgtgatgcacttgtgcttgctgattcagacgcactggttgaagcgctttgcgatgcagacgtacttgctgactctgatgcacttgtcgaagcactttgtgaggcacttgtacttgcggattctgacgcactggttgatgcactttgcgatgcagacgtacttgctgactctgatgcgctggttgatgcactttgcgaagcggatgtacttgctgactcacttgcactggttgaagcactttgtgaggcgcttgtgcttgctgattcacttgcacttgtcgaagcactttgtgaagcagatgtacttgcagattcagacgcgcttgttgatgcactttgcgatgcagacgtacttgctgacgctgaagcgctcgttgaagcactcattgatgcacttgtacttgcagattctgacgcactcgttgaagcactttgtgaggctgatgtacttgctgattcgctcgcactggttgaagcactttgtgatgctgatgtacttgcggactctgatgcactcgttgaggcactttgtgatacggatgtgcttgctgattcgctcgcactcgttgaggcactttgcgatgcagacgtacttgctgactcagacgcgctggttgacgcgctttgggatgcagacgtacttgctgattcgctcgcactcgttgaggcactttgcgatgcagacgtacttgctgactcagacgcgctggttgacgcgctttgggatgcagacgtacttgctgattcgctggcactggttgaagcgctttgtgaggcagatgtgcttgcggattctgacgcactggttgatgcgctttgtgaggcagacgtacttgccgattctgacgcgctggttgatgcactttgtgatgcggatgtacttgcggactcacttgcacttgttgatgcactttgtgaagcagaggtacttgctgattctgaagcgctggttgatgcactttgtgaagcagatgtacttgctgactcacttgcgcttgtcgaagcactttgcgatgctgatgtgcttgcagattctgacgcgctcgttgacgcactttgtgatgctgaagtacttgctgactctgacgcgcttgttgaggcactttgtgatgcgctagtacttgccgactctgatgcacttgtcgaagcactttgggaggcacttgtacttgcggattctgacgcactggttgaagcactttgtgatgctgacgtacttgccgactctgatgcacttgtcgatgcactttgtgatgcacttgtacttgcggattctgacgcacttgttgaagcactttgtgatgctgacgtacttgcggactctgatgcacttgtcgatgcggacacacttgcagattctaatgcactcgttgaggcactttgtgatgcgctagtacttgcggactcgcttgcactgcttgaagcgctcaccgatacacttgtacttgttgattctgacttgtacacagtatctgataccgtttcactttgtgtatatgttgttagtgggtattgagattgatttgtttgattcttatcaaaatctttgtaatagactgttgcaacaccatcgttactgatttcaatacttgcaatccgatctcggccatttgcaatcactctatcatgcgccttcatgatttcttcacgaactttagctttatctatctctgttaagtgatcgatatcctttacttgtgtaacagttatcgaaggcttgttaaatagatcttttaattgaccttgtctaacaccaaattcatcagataaagtcctatttccacttaggtcgactgcttctacacgacgtccccaacggttacctgctccccaaatcaagtcactctttggaacaacggtaaaggtaaaggttgtctggtcatcgctcataacggtattgataatatttggaatagcacccgttccccagtttgtatttccctggaagaaatctgaaaggacagtcgcattcccagttactcgtaaggtagcaagcttgccactgttgtctttaccagtaacggtcacttggatgacatctccagcatagaaaacatagtcgccatttattcctatctgaggatctttgccgtttaccttaaccttatactcaacagttggtttcactttttctgccgtaatcgtcgctgtagccttttctgaagtttccccttcaaatgtgcttgtagccgtaacagtacctacaggcaacaagccattgttatcatcataggcttgcttcagatcctgtgccgtaaaagtaacactttcatcactagctcctgcctccttggtaaactgatgcccattcaaggtcaaagtgaccgtggaaccaggtagaacatttgtgacttgaatagatttacctggtaagccacctgtctctgtcacggagtcctctgagatcactggagtagggataaccgtatattcggcagttattggaatcgtcagagggatatctgacttatcatctgtgatcgtataagcaatgtctaatgtagctttcccagcagttgtaatgtctggtcctaagccatctctgaattcccctataaaattaggatttcccgtaatagttacccaactagtcggatctttactaattctataattttcatcttctacattttgatggaaaactttgtgtttgattgtaacttcaataacacggtgttcaagtgtcgttgaagtcgtaagcaatttagaagtatctgtcgttgctccataacgccccacatcataaatccgcttaatggcgtaggtaaatgttcccgtgttatcaactgttaatggaatagtggtagagctgactccagatgcatctgtccattttgttgtataagaaacatctgtagtgtctgacttaatataatcactctcatctgttccattatgaagaccttcgcttttaagatcataaataggactcttagcttcaatcgtcggtaaaatggtgtaaggaactgaaaccgtgtaagtttgaggatcccctggaagttgaacaataacctccgcaacccgatcccctaccgtattggtattgattagatcttttgatgtcttccaacgtgctgaacttcccgaaggcaaagccaaatcattggctaattttacaaaattacttggaatacttagttctggagaactttcccgataaagagcatagatcttatccactttcgctttaggtgctgcataagtcgctaattttgaattcccagaagcagtgtaagtcgctgtgcctcctgtttctgttggccctgtcttagatgtgctcgcttggatatttccatatggtaaggctgttgtgactgtgacagttgcattcccagaagcatcagctactgcagttccaatagccctccctgctgaattgctcaacgtaacggttgcacctggtgaagctgttactgcaatctgctggttcttcataccagctttcccagtcaaatcagtcgtgattgttgcttcttttggattgaccgttacgacaacattaatctctttggtagctctatgtcctgctccatcctcaccagtcttcacaacaactgttttcgtgaattttccaatttgatccatgctcggagcatcattgtttttccaggtgaaggtatcattggccacaggagtgattgcattcgaaccagatgcatactgcactgcgctgattgcattaattgtaacattgtcaccttgagtaaaggtccaagatctcgtcggacttggtgttgggttggcaacaagatcataaacaatgtgtctgaatgtagatgaaaccgtcagtaacttgctagattccgtttcaccataccgaccctttggaaaaactgcttttaacgtatagtctttataacctactgtattggtattgatatcatcaatctttgtagctccatcatagagtccccaagacattcctgaagggtaccaaccacccgtacctaatttcgtaaggtaattgtaataaccaccacctgaagctgaaccatttgtcagtgattctcctttaaaatcgtagattggacttttggcactaagagatggatagacagtgtaggggatatctactgtttgaacatagccattcggcatggtgacttttacagtagcctgtttatctccttgatctgtcgtatcaaaaccagatacaaattcatacttggtatcacttggtagggtcacacctgtttgagtctttacaaaattttgagcaaccgttaaatcagaagcattttcaccaacataggtatagatacgatctacctttttctctactgtaggagaataggtataggtaaccgttacctttccttgtttaaattcaatcttgtttccgcctctgtagagattataagtgttggcattattacgttgaactttgtaaccaggaatgtccaagtaactcgttaaatcttggacattgcctcctaggccagaaatggttttagatggcttgagctctgcccccgtaatatcatctacatacttgatcgtaatgtaagatccacctgtggtgtaatcgaaggattccaattggaattgctgtaggttccatgcaccacctgtggatgcaaatagtgcaaaagctaattcttcattcccagctgattgacgggttgtagtacgtgattgcgaaagccaagtggaaacattttttgtgaaggtctgtccagcataagtaacagtcatctccttcgttttaccattgtaggttacagtatagtcttgaagggtattatttgtaggatttacagttaacttcttcgcatcataggttctgacctttccgcttccttccgattgaacccaaccaccaaaggcaccaccccctcgtacattactaggatccgcaaaagcaaaggcacttgcagctgggttacttgtattatgataggtatctaatttaaatccaaaggaatattttaaattcgtcccccccataccaagactagcaccagagccgttagttccaagttctcctacagcacctgtagaaaagattgttccaataccatcaccaccagtgtgacctgctgaagagttcccctcataagcatcacctagattgattttcccttttagtacgaaactttcgttcatatcaatcttgtttttcaaggtataggaaccagcttgacttttagtattcgtcaaggttaccacaccattatttaaagacgctgtcccctttgtctcgaaatactcttcttgatcttccggcgtaacatgaagtgctgcttttggcgtgtaagtagcattcccaatatttgttgctgctctgaaacctgatcctgtctgcagtgctctcccattacggctgtctcgaagcccagaatatgcacgtaacaccgtattgactacggtatttcttgtacgagttgcttctgtaatcagagaagtaagatcagtttgatcatctgataaggcagcctcaaccctctgtatcatcgcctgtccttgaagatgagccgaatctgctccttcaacatctactagtcgcgccatataggcattaatttcgttcgacaaggattttaatttagcttcttgctcttgacgtttcttatctgtttcaaaggttgtcgccgctaccgctgttgtagctgtctctgtcacttctgaagttaatgaagacacctgcggagaaagggctggtgtctcaccagaagccaatccagctactgtcgagctgctcacttcctctgcatgaactcctacttcacttcctgtagagctagcttctgaagttaggctctgggaaccctggtgactggctgaagcttgagttgatttagaagtagaactacttgcggattcactagcactggttgaagcgctttgggacgctgaagtgcttgctgattctgaagctgaggtacttgctgactcagatgcagacgtgctagcagattcactcgcactcgttgatacactcaatgaatgagacacagaagcttctacagaggctgactctgaaatagaagctgacgctgcttctgtttgtgattgtgtttgtgaagactctgttgagtgtcctaaaacagctgaatctgatgccgccaatacatctgtcgctggacttaccgcacgctcaagagcagatgcatcattcgattcatctgcttgtacacgataggtcgtagctgctccggttaacaaggctcccgtggttaacaatccctttaataagtgctcttttactgaagaaggtgcgttttcttcgagctgtggcactcggacgctggccttgtcaactcctcccttgaggactcggaacagtccaaaataagaagtcgctgcacggagccaatgttttcctgattttattaatttgaaacgtgtcacgcgatctgtttcgcgatattgacctttggttcgtttaaaatgcatactcttcttcctctaatattaattctaaatagtaacaatttattatatcagataaatgataaacaaactagaaaggcgactataaaatcagcctatcttattcattctatcacatttttagatctctgaatacataattgtaaataatttttataccatcattatatatgtctctaccttttatcctcactcaaaaaattccatcatttctaaagcgatttcgcccattatagaaataatggaaccttttaattataaatcatatgcaaaaaagagaaggaaaaccttctcttttcatatatctccgtatcagataacagagatttattcatgatgacgagagcgatctaatattcttcgttctcatcctcattttttcttcttttagcaacaactcccaagccgactaaacctgttagtaaaccaagtcccagggtagctgtattagctgactgatcacctgtttgtggcaatttagcatgtgtttctgacctctgtgctgaggctgaagctgaaatgcttgtacttagcgaagcactggtacttgctgactcgctcgcactcgttgacgcactttgtgacgcagatgtacttgcggattcagacgcactttgcgacgcagacgtgcttgcggatgctgaggcactcgttgatacactcattgacgctgaagtacttgcggattcgctagcgctggttgaggcactcagtgaagccgaggtgcttgctgactcgcttgcacttgtcgaagccgactggctagctgaattcgacttaatatcatcattcttatcatcaatatccaaaccagctagaggcgactcatcataacgttgttgataagccgtattcccatctgatgtcaaaattccttttagtgttgattcaacgattgctgttgcagttcgaacataaagatttcgatttgacccttcggtaacaattgtccattgcatattatccgcaacaccaccaccaatggttctccactgctgacgaactgccttcaaatttgaatagggcattgaacttgctttagtcaattttgaagaccaatcttctgttttaatcaaattcccattatcattgtaggtcatggttagagaattaatggtatcatctgatgttactaaaataccaaattcattattcgtattaaaggatggcttaatcgttacaacccaagtagtcttgttggtcccagtatcataagaataggtcatcgatttgataatcgtatttttcccaccctcagaaacatctgatcctgtcaaagtacctgaataaatatactgtgtcttaccacttgaatcacgataagtttgaacagcattagttgttgctgccaaattaatagcgatgcttggagcaccgtttgaatcgaccacatttcctgtaaaaccagttttttgcatggtgctcatcatttgctcaacagccaaacctaaacgatcgcgttgcccttcaaaatctccctcattctgagaaagtaaactgttagcttttgtcaactcagtgcgaacagattgaatagcttcactaaggtctgaacgggcttgtgcatccgttacattatttaagtaacggtctgccaagctgacaagtaattgtgcttcagacgtattttgttccagaagtgttttggcggaagtcgcgtctgaagtttcctctacttggtcttcacgcttcttatcttcctggatcacggtcgccgctaccgctgttgtggctgtctctgtcacttctgaagtcaatgaagaagcctgcggagaaagggctggtgtctcaccagaagctaatccagctactgtcgagttgctcacttcctctgcatgaactcctacttcacttcctgtagaactagcttctgaagttaggctctgagaaccctgatgactcgcagaagtttgagttgatttagaagttgaactacttgcggattcactggcactggttgaggcgctttgggacgctgaagtgctggctgactctgaagccgaggttgatgctgactctgatgcagacgtgctagcagactcactcgcactcgttgacacacttaacgaatgagatacagaagctgactctgaaacagaggctgacgctgcttctgtttgtgattgcgaaggctctgttgagtgacctaaaacagctgaatctgatgcagccaaaacatctgtcgctggacttaccgcacgctcaagagcagatgcatcattcgattcatccgcttgtacacgataagtagttgcagcacctgttaacaaggcccccgtggttaacaatccctttaataagtgctcttttactgaagaaggtgcgttttcttcgagctgtggtactcggacgctggccttgtcaactcctcccttgaggactcggaacagtccaaaataagaagtcgctgcacggagccaatgctttcctgattttattaatttgaaacgtgtcacgcgatctgtttcgcgatattcacctttggttcgtttaaaatgcatacgttctttttcctaccatatagtatttttttcaataatctctattatatcaaaccatctctgctatgactagtatcttgttgaaattttttaaccgttttaaatatccaagttctccttctagacgctatccctatccaaataaattactggtactacacactcatttttgttctaaaaagaggctgggacaaaagtcctagcctctcaattgtttttggattgtcgagcaagacgcagtggttgagtgggctctactacgctgatttcatcagcttttacagccctactcaactgtgcggaggtgggacgacgaaatcgaattctaacgaattaccgatttctgtcccactctctgactcaatcttaacttgaccactaattgtaaacgaaaatcatcaggaaaagaagtaacactaaaagagctaaactcgtcaccaaggtcccgatttttagcaaaggctggcttgaccagtaactaccttttccgatattgctcatagcatcattagaaaaaatctgtgtttgccgtggctgtagtgtaatcaatacaattagtagaacacttaaaacaatcaataggattaaacataaaacttccataatcacctcaacaaaccaagcagggtaaagagaagaccgacgataatcaccaaaccaaacaaagtggtgaagattttattaatcctttcgcctgttgtcgctttttcttttttgattggcttttgctttaatttttccatgcgcccttcaacttcttcgtgaaatagatctttctttgacatagtttcctttctttttatgggaaatgggtcacaatttcaccatttggtgagactaagatttggcttagtagcagattacgtaccatatcttttttgatttgtgatttcattgcctcaaaaccagcaaaggcttcttggtaatattcaacgatagggtttttgcggcttgcttgttgcccaccaatagcctgttgcaactgttgcaaatagtctacctgttcaacccagttatcatcaattgcttttaacatcgctaaacattggaaatagcgaacaaggtcaaaagcttctaagagttctttttttcgattcaattcttcatacgcgaaatgatagatcaaagaagcgaccgccctttcatctagtaaatcaagattttctggtatttgatcaatctgaaaactgatattgttgagaataaagtgatacaaatcttccttttttgttaggcttccctcttttacgacattttctatataatcatgaaggacagcatctatggtctcattcaagtcttggtcttgataaatcaagtggtcacgttgtccatagattaactcccgctggatattcatacactcagcatattctaatgtctgacgccgtgaaaaacggcttgcactatcacttgctctttgagctttttcaaccaacctacggtaacgacgccctgttagttcctggtaatgaacacgatcgtccacattgtaatctttgtaaaaattatgtacccactcaggcccgaattttttgatgacatcgtcttctaaagacacaaagaacttcgatattcctggatctccctgacgtccagaacgaccgcgaatctgtaaatctatccgttgactttccattctttctgtcccaacgaccacaagaccacccaactctgctacaccagggcccaatttaatatcggtccctcttccggccatagaagtcgcaaccgtaacagcacccatctgacctgactccgcaatcatctcagcttctctggcaacattattggcatttaagaggttatgagcgattccttctctgaggagcaaattcgaataaagttcagacatctcaacagatccaacaaaaatgagaagaggattgccaagtgcatggtaggtcttaatacactctaaagaagcataaactttttctggcaaggtcacatagagattatctgggtaatctaccctttgtttgggacgattggtcggaatctgaatgacttgcattccaaatgtatctagaaattctttctcagctgtcttcccggtcccagtcattcctgaaatcttcttgaattttcgaaagagactctgataagtaacggaagccatcgcacgcgtctcgggagaaagtttgactaactcttttgcttcaatcgcttgatggagcccaccttgtaattttgtcaactccatgaggcgacctgttgctcgatcaagtaggacaacctcagctcccatatctccttggcgaacgatgtagtctttatctcttttaaaaagtttatgagctcttaatgcataggtgagatgtcgagcaaattctccattatctttggcataaagattatcaattcccagataagcctctgctgaatgagcacctttttctgtcagccaaacctcacctttttcttctttaaagatgtagtcttccccttcaaccattgtggtcataagggtattgatcatgccataataatttgattgtacacgaggagatcccgaaatgattaatggcgtttgagcactatctaataaaaccgagtccacctcgtcgataatcgcgtagttaaatggacgtaaaaatttcccttcttcattcgatgccagattatcgattaagtaatcaaatccgagaccgctattcgtcgtatagataatgtcagatgcataaatcgcacgtttatctgatgcttccagatcttctccatctggtgcaaatggaacgccgatagataagcctagaaactcatagacctgtcccatctcttccgcgtcacgtttggctaaatattcattggttgtgacaagaatagccccttcacccgtcaaagcgtttagataaataggcatggtggctgtcaatgtttttccttctccagtactcatctcagcgatatgaccttggtgcatcacaatagctcccatgacctgtacatcgtaaggaaacatccctaaaacacgccgatcggcttcacggaccactgcataagcttctggcaacagatcatctaacgtttcaccttgttccagtcgctttttaaaggtaatcgtcttgtcccttaattgttgatctgttaatggttcgaccctctcagcccaactattgacttggtgaagtaattctttgacagatttcattggtcttaaacgtttaaacatgtccatcacctacttcttcaatgcccatccctttaaagttcaactccagcacgcctgcactcaacaaagcaatactataataataggcttccttagggtagacaaatgtcaccgaatggctcttttcaataatttgtttcacttccttatcatagcgatcccaaaaacttactttgagataaaccgagtcttgtggaaccgtcgtataaaaagcatctagtcggtaggtctgaccttttttcaataaaggtaagactggctgggtccgacttccttgataattttgtatggcagtccaagaatgtatctccgttcctgaagccactaaaggattataaaaacgaaccgaaccatcttgaaattgttcaacttgtgaaccatgcatataggttctcatattcgctccccataaaatttgaggtgttttcatatatgtcatctctatccttttcttccaaaatcattttctagtatcattcgataaaaattgataaaccaggttgtcgcagtgggcgaatcatcattgtgtcgtcctgtggttcccttgctgaggattttagcacctgaataataaagtgcagtggtcaaatcgtcataagcagttggatccatatcttcatccttcatataagaaagtccaaaggttgtattgctaaaatctgcttgcttaaacttgtcccaaaaacggttatccagttcttgtacctcagcattttctaaaccacctgtctgcatatgaaggacatcaattcctgttggaaagacttccggtgctaacaaccgtgctctatttccaatcgttcctatatttgtaagaggctttgcaacaataatggcatgtggctcaaaatcagcaccataatacatagagggataagtccccattgacattccagaaaaaatcagttggtcctgatcaaatcccaaataatccaaatagtgctgaatggtatctcgtacaccttgttctaactcatcactccccatataaaatgccccacctagtaatcggggatctgaaaatagaagaaagggagtccccatcgaacgcatcatccaatacccctcgaaaccttctgccgggcgaaaacctgcaaaatacacggataagggtggcttgaaatctcctggatgaaagaagtaattcaattcttgacggtgacgatcatgtaagatgcctcctcctaataggtacttcccaaattggaatcgtgtccaacgttgatgaagatttccaactatgagacgcccttgccccttggcttcaagagttgcagatatcatataggtcatctcttggtctagaacaatcgcgccttcacgcatctcttcttcactgacaatgaccgtctttgcaatatcggtaacagcaccttctggaatcactcttaaaatcagctgacactggcaggtctcttctttttcaaactccaaccacaattcgacaggtctatctttatcgactcgtatattataagaccaatttaataggggtttaaaagaagaaccatagtctccttcaaggcacatattctcatgaccattataggttaccttccctttaaatcgtggttgtacctgaatttggaaaggaaacagtttatcaccatactgacctgaaaatagcgcctttggcaagatccgaaggagttcctgaggatgagagaagtcagttggtactgcacacacctcttttgtaaattgttctacacgcggatcgacaattttgatagtttcatcataaaaaacagtatagggggccaaataatcacgtaaatccgataacagccacaaggcaagcggatcatctactaaaacagcatcaaaattttttatttttccctgcttcattcgtgccttaatatcacttgctagcccggcacgcaggtagatccatgttatatttttgggaagctctaactggttcatccaattttcacgtccaatttgcaaaatagtcactttagacattttatttctccttcaagtcattttcccattttgcgacaaagcgatcccctgtattttctctgatcttatcaattgcagcaattaaagcttgattccaatgttttaattgacctagataatagtatgcggcttcctcaaagtcttctaattgttctaaaatataaccattctctaagtgactaacataatcagaagctacaatatttatctgagggatccctgcgctgataccagcaagctgggtgtaccgatgaggctccggactcagatcaacaatcagacgtgtgtactccaattccctcatcaaagttgtttcatcaagaaggtttacaaagtcaaaacgatactccatttcttgattttctactagcttgttttcagctccctgactttctttaatagatacaaaatcatctagtcgaaaggatcttgaaatgaggtcttctactccttttttaaaactttcaaagtcagcatgctgggcattgaaacaaccaaataacaccttcgttctaggatatttagctacaaatgccaatacttgatgaatggcatccatatctaactggtctaaatcgatctgataaaagatttttgattcttttacacgttgactcatccctagagaaagtcgtgtatcgtagggcgccatatgtcgaacttttgatgcctgatctgggaaatattcacaaacctgatccacaaatttctgatgatcactaaccactaatttggttgcttttaaatagggttcgtaatcttctattgtatctgattgattcctctctttaaaccaggttaaaacctttttgctctcctgaggaagatgctcaaaaacatctcggttcattctttgctcagaagccactacaaaacaatccgagctttgggtctgttcttcaagatagcgatcaaagaactcccaaataacctcttccaaattaagatagtagtcttttttaaagcgatgcttcatatccggattgcagacaattccacgcccatcaagaaaatggcacaactgccatatcccttctgaattcatataggcacgataacttgcccgcccatcttgaaattgaaggacactggaaacaaagccacgatcatcataaatcacttctctcaagatttgaccatttcgaaaatagcggatcatgctcagatatccttcgggtcctagttcaatttcggcgtaacgttgccccctcttctctactacaattgcaaagggtgtatagataaaatcacaatcatctccccagcttaagtccttcacttgaaggcaacgcatgggttgatcgggaattccttgaatcgcatcaaaaactgagaaataattggcttctaaaagatcgtatcgatgcaaaaaataccgtaaatgaggttggtaggtcaacaacaatagggttggatccagatcctgttcttgaaagattctcacttgatggagtgtatcatcaaaatcaattttttttcttctattgtaccatggggtcatatctggttgccaaaactcaaccccttgcccgtaccaagcaggaataaaatagtacatagtgctccttttcaatgactttattttgattaaaattcacgcgcttatcccgcttatccccacaacaaagcggggggatagcattaaagatgccttttctatagaaaaccaatcttccataagcaaagaccaaaactttttctactgggctacgaacatcgtagtgataggtagccagacaattgattcatctagctgcctatcactctcaaaacattcttgagagcgatcgtatttgcaccagcatttctcactatcattctactcaaacaatcccttgtaggattcatttagtgtcaaggcttttacttcttctcgaatattataaaccatcccactaaaaatcagaaacatacctggaatcatacttaattgtagatattgtggatccattaaaacgaccaacatggggcctcccgccatcaaaacagtatatactgctccaataactgcaaatctcatgactaaacgattcaggaatcgactagtatcgggaccaggataaataccatagatatattcgccggacttccgcatccgctccgagatttgttcaccactgacatttacaaaggcaaaagcaatggacaaaacaaatagaatcagttggtaaagcaccagccagagaggttgcccaattgtgagagccgatatccatttgggaatccagtcagctttaggaagcaccatccgcaataagagcaacacatactgaggaatagaaaccattgaaatggcatacataaaaggcatcccacctgctggtgtcaacataatatccaaataagagtattgtttaaaccgattatgaatgtcaattttatttaccggaatccgatagcgtgcctcctggaaagtaacagaaacgtagagaaagatcacacccatgacaaccagtaagagaataaaatccaaaccaacatgcaagcgttggatactcgtcacaatctgttgtggaatattcgctaccatactagccatcaaaatcacaatagaaccgccaattcccatgaaagaattcaggtctgacagccaaaccagaaagaaggcccccgctattaaaagcaacgtatttgtgacaattgctaaccccttggggatgcccgcctcaatcggtaagttgagagaaacagccaatgactggatcaaagcaatccctaatgtcaaatacattcgtctccgatcttgaatttctattggtaatttccctaagtttgactttttcgaaagtgtgaacatttgccagagaatcatggcagacatccagggggataagccgacagagaagacagaaagcgactttagattccctcccatcatggcacttgtaaaagttaacgagtaagtggctccacctaaaaagttaggatcatctagattgacaaaaggtaatagcaattggcttcctaacatatatataaagaggaaaaacaaggtccaagagatccgttttaaaacaacggtatgtcgaaatctgctcacaataagtctggcccctttctattacttctacgctcttcaatataatgacgtatagctgccaccatttcttctggatgttcatgagaaaaaacagcctggtaagtttgtccctgtccctgggtattttcaaatgcaaacatcgcgattccggcctgaccaaccaactcatatatcaatgggattttatcaaaatgattgatatctaaataaagatctacctgtggtaactgttgctcgatcaaaagcggatacgtattcggataaagactcacatttggatattgtgataaacgtaataaatctactgccatataagtataagcagcgatttcaaaacgaacttctggaaggtgttggaccaaatattctatctgttctaagagataagaattcgttagtgtataacaggttagaaggggcttggaattttttggtcccaactcaaagccacgttctttccaatgactcatcacctcagaccactccattagatgataccgccaccactggtcacgtaatctcactactgaaaattggttccacggtttatcaggagagatataatgaagaatcaaaggaagcgggtccaaagggatttcaaacacaaatcgatgaccagcttcccctgctcccgcatcaaagccaatttgaaaattgtaaatatcatccaattttaaatagcgatcttcaaataccatattgagaatcgactgatccccttctcccacatttgcatgttcgcgctctgtcgtttcgactagaacctgacggatttgctgatccttccaaagacggttattgatcaataatacgcccgcattaaaaccaattcccgcatcaaaacaagaacgaacggcggcaacataattctctcccaactcctgattgaaaagagaatcaagattcccagtcacaacaagatcactatccaaataaagaacctgatcctcctgaacaaaatctggaataaaataccgtgcaaaggtcatatggttgatatgacccagtttattcgtccaattcatctggaactgtggtccgatcaacttaatatcaagaagctctcctccgagtctctccacatgctctctcgtggcacggaaccactcgactgggatatcttgattgaaaaggtatattttaagctggcgattgtgatagcaaagagattttaaagcggtctctatctgacgaatataagcataatctcctgccaatactactgcatttttattattcatgtatctttcttattctattggcaaacgagataagtctgccacgatttgtttggtgtaggtttcatcctcgatgaattcaatatcttggtcaaaattatattctgccgtgtgtttgtgtttcaacttgactttcgtctgtgctcccatctgcagccactcgtattctgaatcaatatgcccaatatccagtgcttggtaaccatcattcgccaaatgagctgccaatacttttgcggttgggcctaacataatcagaattaagcgatcctccgcatattggcgaatcgtggcctcgattgtgtccacatccttataagcattgtgtgaagaacaaacaattcgtaggatggagtttgcacgatcaaacagatcattacccacccctgtacgagaagttgctccttcaacaatcagaatatctcgattctcccacagttttttaagtttgtcaaactgggaggctgctcgacttttatctttaaagtcaatataagggcgtgaaataaaggtagatccatagcaaggagcttgagcaatttcacgataaaactgatcataatgatccaaatgctttttccaaaaatcttctgcccaccatgtaaattggaagcgatcttcgaaagcatctggcaaacagactaagagtttttctgaactgttcattccaaccaactcacgtagagatcgtgccagatcaggatgataatcttggtaggcgatagaatggccagctattagattgatttcaccatctccaaaacgaatgacagatgaatgattttccctaataaagtccagactctcatcaatggtcttaaccgttggtagagggagaattttaggtaagcttccttccccatccaactgttcaatagccgtgatcagctcctgtggtcgctcacttgaaaaaagaaactgcccatggttcccgtgttgggttttataaaaaccaaaactaggaatccccgccaattctacctgtgatagaatctcaccagcttcatcgccatgattaatatccaaataaagatccgcactatgaatcagctgggtcaactgctcctgattgatcgcaggatacaaactaacattgggacgtttctttaattcgactaacttaggtcccatagctgtccaagcaccaatatgaaactgtacaaaaggaagagcacaaaccagttcttcgattgactcgaaatcttgcgtttgggtcatggtaaaggagtgcaatcgtggaagctcgtgaacttctccccatttccctgtctttatacgctctttaatgagtgaatgcatttgttcaatcgtgttgacctctaactgcgcttgctcactatgtctggtttctgggaaggacaagatcggttttcctgttttcgcataagccgccaaggttgcttgatcagcagtaccatagttaatatctaaataggcagcagaacgatggataagttcttccaatactggagggacgacttctggatacaatctcacattttcatattttgcaagacgcaccaattcctctcccatttccgtataggcagcaatatggaacaaggccttcggatgtccctgaatcaattcctcaaggtttttgaaggattgagaattggtcaaattgaacagatggagctcataatctggatccatctctatctggaagtcccccatatggtgagacaagacctgactgtaatccatatcatgaaaggcccaccataattggcggaaacgattggcacttagcgtcgtccatggttttcggtgagagacaaaatgaacaatatagggatcttcactatctataaagtgatttggccaatgactcataaaagcagtcacgtcatgaccaacttggaggttcatccttttatccaaggccaaccatctatcacgaaagaccttattaaagattgtctgatccccattaaatttaggaatatttccttctaaagcttgctggagtgagccattcgtctccttcaccaactgctctgtcatattttctcgtttccacaaaccattatcaattaataagacaccggaattaaaactttggttatctgtatccactacggctgcgatcggatagcctttcatatctatttcaaagacatcctctaaatcctttagaaccagcaaatccgcatcgagatacagcaccttttcctctgagatatacttaggaataaagtagcgagaataagcatccagactaatatgttcccttgtccaccaggtatccttcacatcgtctggattcaatttgacatcaatgaggtcgccccctaagagctgagccatcctccgtggttttcgaaaccagtctggaaggatatctcgattcaaaacataaattttcacatctttattgtgataaaagatggattttatagtcgtcgataactgagcggtatagttctgatttcctgccagaacaatcgctcgactttttgtatcatgcatgaacactcttctccttgattcgtttttttaccagcacttgctgataagcttccatgtctccatgttttaaggtctcttcttcatgaatggccaatcgccacttataagcagcaatttctgcatctattaagccctttggagctccgatcaattgaagaatcatcatgcgttcttcgatactttgtaacggataaacatctgcaagattgaccgttttggtcacacttgtctcacgtttacgatgcagatagatggcacggttcatatagactattttatcggcttgtagatagaccttgtaggtcgtataatcatcctctaccgttttatctgttggataaacaatctctttaaacaattccgccttataaagctttgcccaagggaccgtgaaacattggctcagattatactgcccatcatattgatgttggaaccactcaaaaggagaatagacacgctcaaaataatcatttcccccaacatggattaaaaagttcccctcttcttccataaattgagtgaaatttccaattgcaatatccgcatctgcttttttcagcaaatgatataaactctcgatatgatccagttccaaccaatcatcattatccacaaagagaatgtagtctcccgtcaccgcttctaaagcacgattccggcttgatccaactcctccattaggcttatgatagaccttcactcgagggtcctgaatcttgtagcgttggcaaatagcggcagaaccatccgttgaaccatcgttgactaagataatttctaaattttgataggtctgttggatgatactatttaagcaattttcaagataggcctctgaattatatacagggacgatgacactaattttttccattttttccttcacctatttcaacctaattcatacctgatttaactcaattgagctaaatattcttgaataacagcaatcatatcatcaatatcctctacatgaaaacagtaactatccccttcaatctcacaatgattggtaacatcaaaagaaaagataggttttttcaacacagtaaccttttgaataatatcataaatctcttcatgataattgatatccaaataaaaatccaatttatccaacacagcttgagcattgtaccgtgtaaaacgaggataaagcgaaacattggagtaggcttctaaagcaattacactaggagcaaaatttgtgtgtgcaaggatattaaattgaacatttggaaatgcttccaccaatgtttcaatatgttccatagctgccgaattcgtaaatactgctgtttggaatttgggccttcctaccaaatccttgaaatgacgtttggtaatatcctttcgtaacaagatttcagaccattccagaccataataaaaccaccagatatcccgacaacgattcaaattccactgataccaaggcttctctcccgcatagtgaatgattactgcgtccttctccagctggtctgccttatcataccattcagggacgttaaaggtgtgagcaaacgtatccataccaaccatcacattgtagacttctggtagttttttccaacgtcctttaaaatgacgattaaggattccttgatctccaaactcctcttgatgatagcgattcgtcaattccagcaactggtggctagctttttcttctctccaaagcacagtgttcacaaggagcacacctgcattaaacttagaagcatctatgccatccgtaactgcggccaaagcatgattttctatatcttcttcgaagagaggtgtcaaatctccagtgacaacaatatcagaatctagataaagtgctcggtcttctgtaacaacatctgcaataaaataacgataaaaggtagcataacttaaatgatccatgggtagcgaatacccttttatctgatcagaagaaatcttaatattccgaatttgtgattgaacagactctaatcttctccccatcaaccagaaccactcctgagggagattgtcattgatcacataaaaaataatttgactgtttgtcgcaacaatagattttatagttacctctagcttttccatgtaaccattatcaccagcaagaacgattgcccttttcactgaaattttccccctcttttttctcaattatccttttataaagtaaataagaaattaatagcatctattaaaagcttcttagtgatatacccctcttttaggaggaaagcaaacccttgagccctactactaatttcttgataggattctggagccatattttgaaccaattgattggcttcttccaaactgttcacagcaaatcctaaaccacgctcttcaatcagatgactatttgataaggtgttgggcacaatcacaggaattcctgccgcaagataggtgctgagcttatgtgaaatattcatttcgtagtaatcaacattctccccatcgttatactgggtattccagacaagaccaaagcctccctttgagagttccatcaagagttcttcattgcgcttccatccttcaatcaccaaattggcttctggattgctctttggctcattcgtaaaaactcgcaaaggggtttcataaacccaattttgcaactctggaaagcgtgtcaaagatcctgcaaagaaaatctcttttttaaatactggttggttcaaactgaggttatgaggatgatcccaaaattcttgaatcaagattttttccacagtcagacctgcttcacacagacggttaaccatttgttgtgaaggcgcaataatgacatctgcttgattgaacatctccatataagtcggcattaggtaggcattatcacggaacattagtggaataacgtcatggataaaaatcactagtttgactctcaaatctttcagcttcgctacaaattccgcgtcaaactcccaaccattccaagttggcgattgaaaaatcacaatatcaccaaatgagatacttgccatgatcccatctagacgcttgcttctctcgctcggactatctgtagagatattataaaaatagattccaatctctcgataccccaaagcacgcgcaatatccgtcacagcattctgagctaagatgacagtgctatcccctgccataccatatagatttgtaatatgtactttagtcatggtttcccttctttatttttctgacattcgaaaaatcatcttcaactcttcttttgttgctagcattggatgcatcttttgcttatcatagactgattgatatcttttaggatcttccagctgagatagttcatcgagcaagtctgtaattgcatctttttgaaacaggtgatcttttatatagaggtctggtcggtgacaggtttcctcaaaagcatataaaatcattcctctttcaagagccattcgatttccgtctaaaatttcatccgcatatgcgatatctaggtaaatacggcatttatttaataaccgctcataattctcacctgaaattcctggataaaggtgaacattcggataatcattgagacgtactaatcgttcccccatctctgtcaaggctgcaatatgaaactgaaaatgaggaagagcagtcacaagaacttcaatctgttcgatttcttgagtgtttgtcaaaatgagaacctgtggctgaaattccctcaaatctcccaaataggtagggaaaaataatagacgatcatgcgatgctctgtcgttagcatcacgaactaacacttttacaccctcgtccaatagaggagcaagttctgcttcaggaagagttgaccgatcatagaagataatctgctccttcgcaagtttgggtaaagccttcaacaattctggatcagacaaaaatactgtttcaacctgcaaaagaacttcttgaagaagggcttttttcgcttcttctatcgaggaaaatccctgttctaaaccatcggtcgtttgatagagcgcacgatcatgttgatggaataaatagagtttccccattttatcattcatataaacacatagatgacattcatttgcactccaaacttctttcataaagaggctaccagaaagatcataataatcacaagtagaacaattgtcatctgaattataccactctacttttttgaccctttgagggtaatcctgataacagtctattctccccctcctcactccatcagcaacaatatccccattcgcatacacttcccaaaacgggggtaacgaaagaccagtcatatgcagagatgaatttacttttcgattagaaaaaataaaatccagaatattttctatctgtagaggctggatgggtattccaatttgttctaagtccttcctcaatctctcgtcgtctaaggaccattcattgactagataatacatcactattcttcccctatttcaccaaaaaatctctccattgtccaatcatttgatctgtcatatagtgtttcgccaattcataagaaccttctcttagtctattcaagtgctcgaaagccttctgcatcgctccattcaagtcagcaaccacttcttcatgtgatcgatctacaaacggaacgataaaaccatttcgatcattttttataaaagtgggattcccataggggacatctgtccccaccatgacaagaccagatcctatcgcctctagcaaggttaagccaaacgtttcccactcggaagtggctaaataaagttcatactccttaaaacgagtttgaagatcttggtgccccttgagatgaatataactttgagcatttaactgcttaattttttcttctatttcttgccaaagcataccttgaccataaatgtccaatgtaacctctgggattttttcatgcaaggctactaccgcatcgatcgctaggtccaatctctttctccgctcaaaccgggccgcaatcatcaagctataaggtttgcgattatcagcatattgcaagccttcaagcccaccgacaggtaagaccgatacaggcttaacagtcgacagatcccgttctaattcttccttttgcgcttccgtagatacaatgatatggtcgaaatagttagcatactgaaaaagaaggaagtattctgaattgatacagtcgccccaatggtgtatcgaatgaaggacacacgataaggttgcttcacccttcatttttaaaagagtctgcgtaaagggaagacgctctaaacgatccacaatgatatggtcttttgcagaaaactgtaaggtgccgatcgcttggctcaaaagctccgactcattataaaaccaataatccccctgccgatagaccgatttcgtcagatcacctggtgtttttttgatttcctccaaagctacggaaccatccaaattataaaaaaggcgctgaaaaactcttgcttctaagcccgcgtcagtgggaacagctgtaaaatattcagtgtaaagctttaccctcccgtaatgttccctacgaagaagatgaccagctacataataatcgacataatcaacataatttgacttaagagtatttcgatgaaagacaagagaaatcccattctcttccggaaatattaactcttgatctcgttcaattggagtggaatgaagattcaaacctcgcttcattttctccacactcattttcaaggtcatatcacgctgatctgttagtaacatatgtactagaatgatttcatcttccgcatatcccaaagacaaatagtaatcccatttatatctaggaggaacttgcgtaaagacaaaacgtgctgggcaccccagtttcctaaagatttgtccacggtaagcctgggcaacatcgacaccattaggctctaattccaccatcagattaaaagtgtaaatcatctctcctccaagcaagttccagttgtactccgataacgatctttctctctccacaagtctaatcagccaatgtggccagataagatttaatttcttccaccatcatttcagggttctgaaccggataaacatgactttctccggactggtccttgctggtattatcaaaggcgtagattggttttccaagtttatgaactttctgtgtaatcgacataatttcattaaaatgattgatatcaagataaaaatctattttttccaaaacggtttcaaaattatatcggttaaagcaagggtagattgtcacatttagataacgttgcaaatcaaccacctgtgacgcaaagaccgtatgagctagaatatggaaatgcacattgggcagggcttgaatcaggtattccaaatgttccatttcgcacgcatttgtgaatatagctgtatggtagagttccggtacggttaaagctcctaaatcacgatttgtgatttctgtgcgtaataatacatctgaccaatctagggcatagtagaaccaccaacgatcacctaaacggttattaaataccgcctgccagggcttaccagctgtatagtgaataatagaaacctttttatgttgttttgctttgatataccactcatcactttggggagaagaagtagccacactatccataccaaccatgaaattatagttcatatctaattctttccactggccaataaaataacgatttaaaagaccttgatcaccatattcatattcatggtattgatctgctacttcaaacagttgagtggaaatatcatgttctctccaatacttattattaatcaacatgactcctgaattaaaatttgtctgttgtagatcgtctcgaacagctgctaaaggacaatctccaaggtccgtctcaaacaaatccgtcaagtccccatctacaacaatatctgaatcaaggtataaaaccttttcctcctctactacctcaggaataaaaaaacggaaataagctgcataagataaatgaggccttggaagatgatactttcgtaagtggttatctgaaatcttcgcattgacaatttgtgagttgattttctccaaacgtttgttcatcacacgaaaccattccgaaggaaggtcatcattaaaaacgtaaaatttaatgttatcattatgcacacaaactgacttaatcgttgtttctaccttgtccatgtacccattgtcggcacctaacgctataactttattcatataacttacctttctatttcaatctaactccaacttaatctcatttatcatcaaatccacctcagaaacggaaaacaccctgtttcgtccgcaattatcatggtttgtgacatcaaaagcataaaccggatttcctttttcagtttaaactatccacagcaattccaaataattgtctctgaatttcttccaccatcatttcagggttctgatgagaaaatatactaccacccaactctgccctgtgagctacattatcaaaagcgaagaccggttttcccttttcaactgcccgatctacaatagaatccacctgatcccaatgattaatatccagatagatttctgattgatccaataaatcctctataatatcatcatggtggacgtttgtgtataacgttacattgtcatactttttaaaggcttctaagcgatctgaaacattggtcttggctgcaatatgaaacgaaacttctggaagattttctaccaaataagtgaggttttccagagtatccgaagctgtcagagtaaagacatgatgctctaattgtggccgctcttttatgatgagttcctctttacttacaacaatggagttacttggaatgtccttatgaatgactgctcctgcaccaataataacattgtcaccgatcgtgactcccttaagaatcacaacattggcaccaatccaacaattttttccgatcgagatctttccataattaaaagcgattttttctacgtggtagttggaatattgatgattactatcgaaaatacgaacgccatctccaaacatggtatccttaccaatttcaatatgatatccacaatgaatggaacagttaatattaaagaaaacgcgattcccgagtttcagggttgccccatttcccacctctaggcaaacaaaagaacgcaaggtaacatcctgccccagttcgacatgagctgtagggtcaattgaaatctgttgaaatttaccatccaattgaaattctgtcatttattctcgtacctttctcatattacaaatcacatcaaccaatccttgccaatcttccattgggaatacctgttgatgatgctctgtcgatttcacttcttcaaaagccaagattggcttatcttccaactgaaaacgatctaagatttctattgtcttttcgccaggattgatatccagtaatacatcactcaaggtaactaactctgcatctaggttaggcatgttattaattcctgagtatacagttacatttgggtagacgagcaggcgtgcaagctcgtcggatactagaacacgtgcagcaatcttaaagcaaacattcggtaagcgttgaatcagatcctccaaatgaggaatctcagctacactcgtatagaccaagcaagtaagcggacgaccttctgggtagagatctacttcacgcagtggagataaatcaagattattagaaacttccgaccaatccaattgcgcataaaaccaccaaacatcccgatagatctgtgccgctagcggaaaccatggtttcctatgagataaataatggagaacctttggaaactcttgaccttctggaatttgataatctgtaaaatgattgtgcagtacaacatgattcagatcaaatggcagttcataccaattgttttcaaataccatatttaaaatagattgatctgcctggtccactcgatcgtgccattcattcgtcatttcaatcaggtattgactcatttgtttggctctccaataagcattgtcaatcactaaaaagcctgcattgaagatttctcggttgtaaaagacacgtcccccataatctcggactgctgcgacaggatatccctttagatccattgtaaagagatcatcaagtggccccgtcactaccatatcacaatccatgtaaatcacgcgctcttctttaacaaaatccgaaataaagtacctcaagaaaacagtataagatatatctgtcttgtactgttggatctgcgaactcgtgacacgacaatttacaatgtcactatcaaaacgaacaagatgacgattcatccccgtaaaccactcctgtggaaaatcaccattgatgaggtaaaagcggatattccgatggtggtaaaggactgatttcatcgttgccaaaacctgatctagataaggataattggcagccaaaacaatagcccgtttttctccacgatgcggttgtgatatcaaactcaaggcttgaaatttttccgaaatttgtcgataagcctcactattctctaaaccatgaaatcgactattcgccaagcacgcctttaataccatttgataaagattgatcgttttttcaagaggatacccccggttggctaaaagcgccaatttttcttccatctcacaaaccaaggcaggcatccactccccagtccaagtatgagagagactacccgtgcgttctcgataagcatataaacctttattcagatagaccactctctcactgctcaaaaaagccttgaggctcaagaaatggtcctctcctattcgatcctttgaaaattgtaactcatcaaacaaggaacgtttgtaaagtttcccccaagcagagaggagcgcaaaactcttattaaactttgtctcataaagtccatcaatcagctgtacaggggtatagaggcgctcataataatcctgctcccccataaagaaataaaagagactctctgcatcattaaagagataataattagcggccactatatctgcatgataagttattagtttatcatacagttcttcaatataagttttctctatccaatcatctgaatcaacaaaggtcacataggcaccagatgcttcttgcagtcctatcattctggtgtcaaaaacaccggaattttccttaatatggtaggtgattcgttcatctttttcaagatactctcgacaaatcgcatcacttccatctgttgagccatcattgatgattaggatctcaagattttgataggtctgctgaagaatgctatccaaacactgtctaaggtatttttcaacgttatatacgggtacaattacactaactttttctgtcatttttactttttactttttttatttgggaagatattctgcaataaaggcagagagatccttactcatcatactttctagtcgttctgcaacgacttgttctggccaatcccaccaggaaatcttttgcattgccaaacgctgttcttcatcttcaatacgataacggatgagttttgctggatttcctccaacgattgcatacggcgctacatcttttgtcacaatagatccagccgcaattaccgctccatctccaattgtaactcccgccataatttggacattgttaccaatccagacatcattccctacaagggtaggtttacaaagaacatgatcatccgaaattggcaaagactgatctgtataaaatttttctaagctcttaaaaggatacgtcgtcaccaagtcaagagcatgattggcggtcacaaagtagacattctgtccaatagagcaataatcccctatgataacctttccaccatgatcaaagtcaaccaacaaaggaatgccataagtatgtggccccacagttaaggcaccataatcaattaaatgacgacttgtgaatttcgtcttaaaatcgaataaatctgatcgcaaatcataaagacgcaactcgagcggaatggtttgctgatgcattccttcccaataggaataaccttcctcctcataacaacaggtaaaggtggctgtcaattgcttatccttggaaaacaaacgaatctgatgattttcaacatcccaatatcgttcgttatcatgaccttctccaccaatatcttggatctgcccatcaggtgacaatcgaaaataacgcgaatattgcttattcttatgtgaaaacacacaataccgaccgactacaactgccatttttcctcatttctatctaaccatatttttttacatcaataattagtacaaataggctgaaatagttggaaaatcaacctccaaccggccttattgccacgttattattataccttatttcagatagtcgatccatacctttggctgaaattatccgtatctgatggaaaagttagagacaaaataatacaaaaacagggggatctgaacaaatcttgaaatgttctccacgatcacccctatttcatattttattttgtaattttttccaacatactttcaatgtgttggatggatttttcgcgtccaagcaagtagatggtatctggcaattcaggaccatgcatctcacctgaaacggcgattcggattggcataaagaggtttttccctttgataccagtttctttttgaaccgctttgatttgtgggaagatattttctgccacaaactcatcgtctgacatggcttcgagtttcgctttgaaggcttcaaggacagttggcactgtttcaccagccatgacttctttctctgcttctgtcaattctgggaagtctgagaagaagaggtctgtcaatggaacgatttcatccactgatttcatttgtggtttgtagagttcaaccaatttctcagccttgtctgtcaaacgtcctgcttcttcgaggaatggtttggccatttcaaagatggtcgcaagatccgcattcttgatatactcattgctcatccagtccattttcttctggtcgaaagctgctggagacttgctgagacgattttcatcaaagagcttgatgagttcttcgcgagagaagatttcgtcttccccaccagggttccaaccaagaagagcgataaagttaaagactgcttctggaaggtaacctttcttccggtaatcttcgatgaactgaagggtattggtatcacgtttagacaacttcttaccagtttcagagttgatgatcaaggtcatgtgaccgaactctggcgcttcccagccaagggcttcatagaccatgagttgttttggggtgttggcaatgtggtcatctccacggatgacgtgagagatttgcatgtcgtggtcatcgatgacaacggcaaagttataagttggatagccatctttcttttggatgacccagtccccaccgatattgccaccttcaaactcgatatcgcctttgaccatatcatgccatttgtagataccagactcattcaccgccagacgaaccgttggaatcacacccgctgcttcacgttctgcgatataagcagctttttcttcttcgctcatgccgaggtattcattgatgtagcgaggtgtttcacccgccgcttcttggcgttcacgttcagctgccaactcttcctcagtgacgtaagatttataggcttttccttcagctagcaattggtcaatgtatttttgatagagttccaagcgctctgattggcggtagttttcatgcgtctctggactttcgtcccagtccatgcccaaccaacgaaggttttcaagctgtgaacgttctccgtcttcgacgtgacgtttgcggtccgtatcttcgatacggatgataaaggttccaccatggtgacgcgcatacaagtagttaaacaatgctgtacgagcatttccgatgtgtaatagccctgttggacttggtgcataacgcacacgaatatcttttgccatatttctctcctcttatcttgttcgctatttctagcgcatttattcaatcgttcctattataccacaaagaaagcaggactgaaatgaataagtgacctttctagcctttcttcctatatatgaaaaaagtcagaacaaatgctctgactgatatccaatctatttgtatcttattttaaccgttcttctaattcaaaatcgattggcagggtttgtaaaaagtgctccaactcacgttcccagtagaaccattcgtgcttgcctgggctgtgggtataggtgacatccaaacccaacttttctaattccttgacttcaaaattattggcctcataaaggaaatcttgctccccacaccagatccagagtttggtcttcttatctgaaaacttcttggcagcagtctccagcgaatagggactggtcgtccaatcctcaatctctccaaagatccccttccaaaaagctggttgctccaagtcattgttttcaaggtctctatcgtggaaactcagagcaccggaaaaactagccgcatgggagaaacgatttgtcttgagagccaagagcatcgatccatagccacccatggatagaccagcaataaaggtcttctcccgtttcttggtcatattagggaagaagcgagaaagagtctctggcaattcctccgcaatggccgtgtagtagttgtagccatactgggtgtctgtgtaaaagccattattggtattaggcaggaccacgatcaaattggtatttcgaagaatgcgctccacattggtccgcttcaaccaggagtggtggttcccattcatcccgtgcaagagataaagcactggaatatccgtatctgctggatcttccacgcgcgatgcatcgggataaaggacggacacaccccactccatcttcaaggcttctgaataatactcaatctgcataactgccatttgatttcctctttctactgttaaaaacactcggcaagcctctggctgccaagcgtttccatttcttctattatttcacttccatcacaactggtaggatggctggacggcgtttggtttgttcaaacaagaacttagacaagttgtcgcgtaccaaaccttttaactcaccccagtcaaagctgtcttgtgccaaatagtcttcaacgctttggttgaccaattcgcaactttcacgaagaatatcccgactcttcttaacatagacaaaaccacgggtgtgcacgcgcgctttggaaataattttcttctctttgcgattcactgtgatcgccacgataaagatcccgtcttctgacaagaccttgcggtcacgaaggacaatattgcccacatcaccaatggcattcccatcgatcatgacatctccagctgagacgctaccagcagggacaaagtcccccttttcgtactccatcacagttccgcgttttggaataaagatattttcaggcaagataccgacttccatcgctacccgcgcatgggcatccaattcgcggtattccccttggatcgggaagagatatttaggacgaagaaggttgatcatcaactgcaagtcccgtgcgtttccgtgaccagatacacgcaagcttgacgtgatcaatttgacaatgccacctgcttggtagaccatgttttccacacgagccaccacagcttctttagcaatagatggtgttgtaacgatgtagaccaagtccccatctttgatttccacatagcggtgacggccaatagacatcttgcgcaaaccgttgatcggctcacccatccggcctgtttccaaaatgatcaattcatgatcttcaaaacggctcatttcttttggcttgatcaagagtttttcgttggcaagagacaatttgttcaagcgaatagctgtccggacgatgttttccacatcaaaccctgtcaagaccactcgacggccagtctcagccgcagcatcaaagacctgctggatccgtgagaggttgctggctaccgccgccacgatgacacgaccatcccagtccgcaatggtgtccaggatctcatcgcccacttcttgctcactagcaacttgaatcttactatccgcattggctgaatcactcaagagcgcaaggacaccctcacgtccaatttcagctaggcgggcaaaatcagttgcatacgactcacttgcagtttggtcaaatttaaagtctcctgtatagacgatattgccctcagaagtaccaatcacaatcccaatactttcagggatggagtgagttgtttggaagaaggaaacgacggcatctccaaagtcaatttcagaattttgatcgatgacatggaagtcattgaatttcttcacactgtcattgctttttacaaagagtttggccaactcaatagtcaactctgtcccgaatacagggaccttcgcttccgccaaaagataaggcaaggccccaatggcatccgcatgaccatgggtcaagaaaacacccgcaatgcggtccttattttcaaatagataatccatgttggggataacgacatccaccccaagttgctcattttctggatacttcaaacctgcatccaagacaaaaatcgaatcgttcacttcggcaacgtagagatttttcccattttctcgaacaccgccaagagtgactaatttaatactactcactgttgtctcctttagtgtgattattttaatacttacggtccttggtcgcccaagtcgaattacagctttgcaaatacttgcatatccactctattatacaatttttttctctttttttcaaaaagctttccacagccaaaaaagccttcccatctaaattagatgagaaagcttctaggcgcctacttttagggggaaaagaccctaaagatggtaatctccccgtttattttcaatgatccgcatggctgccttgatcacatgaaacttgcctaacaattcctctaggcgcttactatttcgctcgctcaattggccgttcttgaccgcttgggacaggtgataaaagtcatctaagtcctccccaatgttttcaaacagttctttggcttccttgagtcggtagcgattgactaggtggttcacatcttttttgaaggaagcgacattgctttcatgaatgtccgtataagcttcctcttcgtccttagattcttggtaattgaccgccttaaaacaagtgatgaattcccgacttttgatattgcagacaaagatgacaccatcactggctacataggcttctgtattagctggttgaaccgcattactatcataaggagagagagaggggaggtgttggttgatccacctgttcaggtgctgatcatctacgccaaagcgctcaaaagctctttgccgaaaatggtcacgacaactatattcttgcgcatacgacaatcccatactctcacctcctcctgggtattttataaaaaatggcctccagtcttacgggactagaggcctggtctgcttcactgacttggtgcaattaaccttttggctaacaaaacaatgtttatgatgttgatttcatttaatagtatttgtgtaaaataccagaggttttctttgctatcccaaatccaaatgattagttttcgactggacgcattgaagtttgaaaacctttacaaaaagcttctacctactatttccacgttttcttatgtctccgagcaaactaagcaggttcgcccgaccgtccaaccgatccgacacacacgacatgactgctcttttacgataagagcatgaacagatatcagcaaaacagacctaaaacgaagtaacctaaatgatatctctacaaggcattggtatcaatcccttcttcatctttctaactatattatactcacctaccagaataattgcaagcgatttcagctgaaactagttcctatttttatgtggttttattgatgatttaagaaaaagaaaagaggatgggacaaaagtcctagcctctcaattatttttggattgtcgagcaagacgcagtggttgagtgggacgacgaagcgtcttcaatcgtatagcttctgttctactccctattttgactgtatccgctacgccctttgtatcttagcggaatgcgacaggacgaaggtggatcgataccatccaccttaggagttagtgagtcgtgtaggtaaggtaccatagtacttgccgttacacgaattgaacacgccctaaatgctgtgtgaaaaagataaattctcttgtgagcatcgctcactgcaagaatttcctattttcactttgcattttacgggctttgtatcttattctttctcaaataattgatagtagtctgcgatggtcatttgggctttttcttcttgactgaggtcttggacgatgtgcccatctttcatcacaatcaagcgatttccatatttcaaagcatcttccatgtggtgggtgatcataagagctgtgagggcatcttgtttcacaaactgatccgtcaaggccatgagggcctgactcgtttttggatccaaggctgcagtgtgttcgtctagaagcaagagttctggacgtttcagtgtcgccatcaacagactcaaggcttgtcgttgcccacccgatagaaactcaacggctgtatcgatatgattttccaagccattgccgatcttagcaaggactgtttgaaactcttctttatagctggccaagtgacgcgggatcaagccacgtttttctccacgaaacttcgctaccaagaggttttccgctactgtcatgcgaggcgctgtgcccattttaggatcttgaaagacccgcgataagtacttagctcttttttcaggagaatagttggttacatcttcccccaaaatataaatcttcccactactcaccggaagcgtcccagcaatggtattaaagagggttgattttccagctccattgccccccaaaattgtgataaaatcatgctctcgaatttccaaggaaacatcatccagaatgactttttcttcgttcatcccattgctcacagctttggttacattttttaattctacaatcgctgtcatttactgaatttcgctcctttcatgatttttcccttaaaggttggaatcatcaggcagatagctaggatcaaggcactgaaaatccggatatagctggtattgatgccaagcgcaatcacagcccaaatcaaaaattggtaggcaatcgaaccgactgcgacgctgagcaaacgctccgtcaaggtgacatttgaaaaaagaacttccccaataatgagactggcaagtccaataacgatgacaccaatcccacgtgaagcgtcggcataaccttcttgctgggccatcagtgcaccagagagggcaataatcccatttgaaatcaccaaacccatcaattccatccggtcagtattgatcccgaaacttttagccatgtcagcattgtcacctgtcgcgatataggcttgacctaaacgtgtatctaaaaagaaaatcaagccaagaatgacgagggtcacaaaaatcaagccaatcaaaatttcacttaaacctccagcaaagggaagataatcttgaatttttttataacccaagagtcccagattggcccgttgcatcacaaaaagaatgactgagttacaagatgtcatcacaagaattcctgacaagagtgtcgggattctcccttttgtatagagaagacccgtcgcaagtcctgccaagcatcctgcaccaatagcagcaagcgtcgcaatcagtggattgacccccttggtaatcaaggtaaccgccaccgctcctccaagcggaaaggaaccttcagttgtcatatctggaaaatctagaattcggaacgtcataaagattcctaaccctaaaatggcccaaatcaaaccttgtgaaacaattgaattaatcatagtttctcccttcgataatagtagtttaattgtaacataaatatggaggagaacctatagctttggaagaattaattctaatctgtgttctaacttcctaaaattcattttcctttttcagtcgattcgaacaaaccatctcaccggcatcgcagagatcaatagaaaaaaacgaacgataggtaccttgcctttgtgaaaaccaaggtttttcattcgttttttctatcatcaagtttaatctttggaagtatttctagtcgctttgtttcctatcttgctctacgacaataagggtgtgaagttcttccactccaaaccctactgttattccaatttcaagtggattcattccccttgttgccgacagtttgatctttcaaattgctgtactagtatactgttttctcaattttaagtcaatgaaattctactgaaactagtaacagaattatttctgatatatttcacatctctatttacatggggtttctacttctataatagataaacaaagaggctcgctctctcaagcaaagcctcttcatgtttgaactaaaacggtcacctcatcaacaagtttgtcgatgtcacctccattttagtcttcgcgttttttacgttttgcaagtcccgcaagtccgaccataccaagtgccgcacctaacaatgcagcagacgctgattgctcttcaccagtttcaggaagtgctggagctggaggagttgtaggtgttggtggtgttggtggtgttggcggtgttggtggtgttggcggtgttggcggtgttggtggtgttggtggtgttggtggtgttggtggtgttggcggtgttggcggtgttggcggtgttggcggtgttaccttattgttaaactcggtatctaccggcaacgtagaagttgctgtcaacactttaccatccttagtaactgttacagtcactgtcgcaaccatcttatcatattctacaccagcttccgtaccttgcacctcttcaactgtataagtgtacgtaccttcttgaccacgtgtatactcaagagctgagaatttgatcttaccagctgcgtcgttacttactgtctcgatgatgttaccatctttatccttaagaacaaagctaaactcaccagccttcaactcacgaccttcaagtcgcttagtaaactcaaactcaaccttagttgggatgtttactacacgtttttcagttggtttttctggtttcttaacagttctgctagttggatcgtattggtgtacaatttgagttgctgtattttcaatatccacaccatctttcgcagttgctttgatgattgcagggatttcaaacttgtaataacgtccaaatgcaaacttagttgtatcaatcacttgcgtgttgttggcatcgcctagtgatttcgtgaagccagctttaagagtcgctgtgatcacaccattattgaccgtgatatcgaactgatcagttacatctgcacctgtcactccatcgtaagctttaatttctgctacgttgacatctaagttttcgctgtcatatttatctgttacacctacagattgaatattttgagcttctgtgaatttagttgtatccaaccatacttggtagtaaactttatcacccttcttaagtgtctgtgtattaatattttgagcttcattgttggctgtgccatccgcatatgggttggcgtttgtatcaccatacttgtctgccaattcagaatcatcgtccaagagttttgttcctgtaagatcaaatttcgattcattcaggatatatttctctgggttaaattctggagtttctggcggagttaccttgttgttaaactctttgtccggtgcgtctgtcacatttgcgacaatcgctttcgctgtaccattatgtgaaacaatgacttttacagtcgcaaccattgtatcgtatgtgacagttgcgtctgttccggcaacttcacgtactgtatagttgtaagtcttgcctagatcctcgttaccaaactcaagtttcttgaagttgatcttaccagctgcgtcgttcttcacgcgttcgacttcaacaccatctttttcaagaatgaactcgaattcacctgcttgaagagcacggccatcaagggctttcgtgaatttcaactcaagtggtactggaacgctatttacacgtttttcagttggtttttctggtttctcaaccttgttcgttcttgggttgtagtagtgtacgatttgtccagctgtattttcgatatctttacctggctcaacagttgttttcacagttgtcacgatatcaactttatagtaacggccaaatgcgaacttagttgtatcgatgatttgagtgttgttggcatcgcctagtgatttcgtgaagccagctttaagagtcgctgtgatcacgccaccagtgtttgcgatatcaaacttagaagtaacatctgcaccagttacgctatcgtaaaccttgattgaattcacatccaatttatcttcatcatagttatctgtgatgccgagcgtttggatgttttcagtgttggttgcgctaaattgtgttgtgtctaaccatacttggtaaaccaatttagtgcctggtttcactgtcttcgtattcaagttttctggttcattgttggctgtaccatccgcatatggattggcgtttgtatcaccatacttgtctgccaattcagaatcatcgtcaaccaacttgtcgcctgtgatatcgaatttttctctatcaacgacgtatttctctgggttgaacttaggttcttccggaggtttcactgtgttgttaaactctttgtccggtgcgtctacaacattcttcacgattgctttcgctgtaccatcatgagagattgaaacacttacagtcgcaaccattgtatcgtatgtgacagttgcgtctgttccggcaacttcacgtactgtatagttgtaagtcttgcctagatcctcgttaccaaactcaagtttcttgaagttgatcttaccagctgcgtcgttcttcacgcgttcgacttcaacaccatctttttcaagaatgaactcgaattcacctgcttgaagagcacggccatcaagggctttcgtgaatttcaactcaagtggaactggaacgctatttacacgtttttcagttggtttttctggtttctcaaccttgttcgttcttgggttgtagtagtgtacgatttgtccagctgtattttcgatatctttacctggctcaacagttgttttcactgttgtcacgatatcaactttatagtaacggccaaatgcgaacttagttgtatcaatgatttgagtgttgttggcatcgcctagtgatttcgtgaagccagctttaagagtcgctgtgatcacgccaccagtgtttgcgatatcaaacttagaagtaacatctgcaccagttacgctatcgtaaaccttgattgaattcacatccaatttatcttcatcatagttatctgtgatgccgagcgtttggatgttttcagtgttggttgcgctaaattgtgttgtgtctaaccatacttggtaaaccaatttagtgcctggtttcactgtcttcgtattcaagttttctggttcattgttggctgtaccatccgcatatggattggcgtttgtatcaccatacttgtctgccaattcagaatcatcgtcaaccaacttgtcgcctgtgatatcgaatttttctctatcaacgacgtatttctctgggttgaacttaggttcttccggaggtttcactgtgttgttaaactctttgtctggtgcgtctacaacattcttcacgattgctttcgctgtaccatcatgtgaaacaatgactgttacagtcgcaaccatggtatcgtatgtgacagttgcgtctgtgccggcaacttcacgtactgtatagttgtaggtcttacctagatcatttttaccaaactcaagtttcttgaagttgatcttaccagctgcgtcgttcttcacgcgttcgacttcaacgccatctttttcaagaatgaactcgaattcacctgcttgaagagcacggccatcaagggctttcgtgaatttcaactcaagtggaactggaacgctgtttacacgtttttcagttggtttttctggtttctcaaccttgttcgttcttgggttgtagtagtgtacgatttgtccagctgtattttcgatatctttacctggctcaacacttgttttcacagttgtcacgatatcaactttatagtaacggccaaatgcgaacttagttgtatcaatgatttgagtgttgttggcatcgcctagtgatttcgtgaagccagctttaagggtcgctgtgatcacgccacctgtgtttgcgatatcaaacttagaagtaacgtctgtaccagttacgctatcgtaaaccttgattgagttcacatccaacttatcttcatcatagttatctgtgatgccgactgtttgaatgttttcagtgttggttgcgctaaattgttttgtatccaaccatacttggtaaaccaatttatcgcctggtttcactgtcttcgtattcaagttttctggttcattgtttgatgcatcatccgcatatgggttcgcatttgtatctgcgtacttgtctgccaattctttgtcatcatcaacgagcttgtcgcctgtgatatcgaatttctctttatcaacgacgtatttctctgggttgaacttaggttcttccggtggtttcactgtgttgttaaactctttgtccggtgcgtcttgaagcttgttcacaacagttgtcttagtcgttccgtcatgtttgacttctactttaatcgttgcgaccatgttgtcataagacacagtggcatccgttccagcaacttcttccacagtgtaagtgaaggtattaccagcgtccgcttttgtaaattcaagtggcttgaaggcaatcttcgcgattccagttgttgcatctggcgcactgttcttcacagtttgaattgcgacgccatctttcttcaatacgaatgtaaattcgttttctacaagatttcggccatctaatttcttagtgaaatcaaattcgagtggaactggaacgttgtttacacgtttttcagttggtttttctggtttctcaaccttgttcgttcttgggttgtagtagtgtacgatttgtccagctgtattttcgatatctttacctggctcaacacttgttttcacagttgttacgatatcaactttatagtaacggccaaatgcgaacttagttgtatcgatgatttgagtgttgttggcatcgcctagtgatttcgtgaagccagctttaagggtcgctgtgatcacgccacctgtgtttgcgatatcaaacttagaagtaacatctgtaccagttacgctatcgtaaaccttgattgagttcacatccaacttatcttcatcatagttatctgtgatgccgagtgtttgaatgttttcagtgttggttgcgctaaattgttttgtatccaaccatacttggtaaaccaatttatcgcctggtttcactgtcttcgtattcaagttttctggttcattgtttgatgcatcatccgcatatgggttcgcatttgtatctgcgtacttgtctgccaattctttgtcatcatcaacgagcttgtcgcctgtgatatcgaatttctctttatcaacgacgtatttctctgggttgaacttaggttcttccggtggtttcactgtgttgttaaactctttgtccggtgcgtcttgaagcttgttcacaacagttgtcttagtcgttccatcatgtttgacttctactttaatcgttgcgaccatattgtcataagacacagtagcatccgttccagcaacttcttccacagtgtaagtgaaggtattaccagcgtccgcttttgtaaattcaagtggcttgaaggcaatcttcgcgattccagttgttgcgtctggcgcactgttcttcacagtttgaattgcgacgccatctttcttcaatacgaatgtaaattcgttttctacaagatttcggccatctaatttcttcgtgaaatcaaattcgagtggaactggaagatttactacacgtttttgcgttggtttttctggcttagtgatatttctattcgttggatcgtactggtgaacaatttgatttgccgtattttcgatatcgacaccatttggagtcgtcatcttgactgtagcaggaatatcaaatttgtagtaacggccaaatgcgaacttagttgtatcgatcactggatcattgttgatatctttaataaatgatgctttggatgttgctgtgataactccattattaacggtgatgtcaaatttatccgttacatctacacccgttactgaatcgtaagctttgatatctgcaacattgatctccagtttgtcagcttcatatttatctgaaataccaacagcttgaatattgtcacttgctttcaagtttgttgtatccaaccatacttggtagacaatcttatcgcccttcttaactgtcttcgtattcaagttttcaggctcattgttggctgtaccatctgcatatgggttagcatttgtatctgtatactcatctgccaactcatcgtcatcatccatcagtttcgtaccagtgatgtcgtatttctctttgttaacaatgaatttttctggttggaaatcaggcgttgttggaggagtcaccgtattgttaaactctgtatctccacctggatatgttacaactgcttgaagagcatggcttgttgcattttttacaacagatacagaaacttctgcaaccatgttatcgtaagtgacaccgaattctttgttagctggaactttctcagacaccgtgtacttgatgactttaccaacttgagcattcgtcacttctgggagttgattaaaggtaacaacaccatgttcatcattggttccagtagcaacaacaactccgttttcatccttcatttcaaatgtaaattcacctgctacaagtgcacgacctgctaaagcttttgtgaaattaacatttaccggtactggaggaaccacatagttgttaaactcagtatctgttggaagagttacagcagcgttcaacaatcctgtagtagcatcttttgtaaccgtaactgtaaccgtcgcattcatggcatcgtaatcgatgtttgtatcgttacctgctttttcacgaactgtataagtgtgaacaccttcagttgcatatgaaatggcatcaaatgtgatggatccgtctgccacatttttcttcgtttggattacattgccattttcaagcaattcaaactcaaagtcatcaccttgaagggtttttccttctaatttcttagtgaatctaaattgagcacttgctgggcttggcgtataggtattgttaaatactgtatctgttggaagagttgtcactgcagtcagagcatgacctgacttggtaacagtaactgttacttctgccttcatggtgtcataagttaccccagtaagtgaaccttgaacctcacgtacgatgtacttatgtgttccttcttgaccattcttgaaggtaagagcatcaaatttcacaagtccgttggcatcatttgtcttcgtttgaagaacttttccgtttggatctgttgaagtatcgcttgggtctaccaactcaaagctaaattcaccagcagtcaactgacgacctgcaagaaccttgctgaagtcaaattgcgcggtgacaggagcaacgacatggttgttaaagattctgtcatttgcatctgttgcttcaccacctgatcaagtcatcgctgtagttgctgacaagaggcctgtatcagcgtctttggttactgtaaccgtaacgtcaattgtcatagcatcatagtcaacatctgcaacgtttcctttcacttctttgacagtgtagttgtagacaccaactttatcgaaggataatacactaaagttgattttaccgttagctttgttggttactctttggtcggtattggtatcacccgcagtgttagcagtcaatgtgaagctaaagtcaccagcgttcaaagtaccatttgaaagtgatttatcaaagtcaaggtttactttcactggagatggtgtatatttgttattgaattcagtatctggtgttcctgtagttgagttaccgtcagcatctacaccaccagttgatgaaatcgttgaaacagccgctaaagtatgtccagtttctggttttgtaacagtaaccgttactttcgcttccatttggtcataggtcacatttgccaatgatccttggacctctttaaccgtataattaaaggtcttgctgtcatttcgctttcctgaagcatcttttccaagatcgttcactgtgtacttgatacctgtgaacttcacattaccagctgcatcgttggttgcagttccaatcacagcacctgattcatctaaaagattaaaggtaaactcatttgcttgaagcttacgaccagataatttcttcgtaaagtcaaactctacgttcactggagctacgacaaagttgttgaattcagtatcattacttgctacagatgaattatttggctgaccattgctatcttggccatctgttgaagtatatgtaactgtatattcgtactcacccaaatagccagaagcatctttcttctctttaactgtaacggttgccgtaacacgcattccatcatagtctacttctgaatctgttcctgctttttcagtgatgatgtacttgtaaacaccttctttatccaaagtgatcggtgcttgtgctaccgtaccatcttctttaaccactttttgagttttaaagattacagaaccatcagctttattcgtcacatcctcatcaatagctggggtagtggaatccgcattcttaatattaaaagtgaagtcaccagccttcaaagtccgtttgtttgtagggtctgtcaaggcttttgtaaccttcaactctacatcaattggaggaatcttgtcatagtagtagactgctggagtaaacggcgtcaaggtattcatcaagtcgacgttcgtaccgatcccttttacaccattgaccaactgactgttggctgaccagtgaccaattccgtctcccaagaaaggtacaaagacagtcttgtacggtgtatagcctgccgcatcctggaacttgaaatcaactgggattccatttggatggctcactccatcgcttccagtaaaagcaatagtattcaatggggtcatatgcgtcacaagcggtttggtgttattttgacccggtgcaaccggttctgtttccgcaatcagcatatacccatcagtatcaagagtcccgtttgaacgtttgctttgttgctttggatccaaaagataaacgcggataacgactgagccgtcttctttaacaacttccttaatccgcttaatgccgtatgcatccgcatccatgaacttatccccaaccttaaagcgacggctgagtgctccagaggttccgtttggttccgctggttgataaaggcgataatccttgaagtggcggacacccgaagaagtaaagtcttgcccttccatccccgtcactgtataagttgctaggctttcttcgttcccagtttctttgtagttttggatagctgatttttctctatcggcctttgacttattaggattcgctttgtactccgcactattcttatctactactttataaaaagttgagttatcaaccattgcagggatgattcggttggtatttgtaatggtacgaccgtttgatgctggttctactgcattaaagatatctgtaatggtacgtgagtccgtcacatctgtaaataatttctttttagcttggtcagctggagtgttacctgaagcgtgttgataagattcaatcgttggatccacaatccagtcccactgtaagaatggctggtctgttttaccagggccttttcctttaccagcatcataggttacataaagtgtcaactctccaccagaggcgttggccgttttagacccttcagctgtcttagtgaagacttgtctaccagatcctgctgtcacagtgtgtgtttcaagaacagtattagtcgttttatcgaccaactcaaccactgagctaacattttggtcaaagtcttttgatacacggatgtagtagtttttgttgtaacgcgtattataacggctcaaatcaatgataccgtatgtatacttgtcacccgaaacagcttcatatccagtcgggatcgtttgcgaatgaacagtcgctccattaggattcgtcatgtctggagtggcttctgtattcggattcaaggttgaagctgtagtcaccggctctgtattatgatccgttgctgcacgacggccacgacgtcggctacggcttgtttccaaagcacctgctgtcgctgtttctgttgaagcagctgaaagggttgtcgcagaggtagtcgctgcagaatccgcaactggtttgttcgctgatgcatttaagggttgcacggctggattggctgcaagagaagttgtttctgcctcagtcgcttcagaggaagaggtcgcttcagtatttgcttccgaagttgcagaggtagtcgctttttcagtcttcgcctctgttgaagacttcttatcctcagatttcttatcttcagacttcttatcttcagattttttatcctcagttttcttttcttcttttgacgcttcttctgtcttcttttcttcttcagaagctttcgatgtttcggtagttgcctcagccttttcactggaagccgtcgtaactggctcagaagttgctactagcgctgcaggagcttcatagtttgagctctcagtagtcgttgtttcagtcgccacttctgtcgatgatgctgtttctgttgctgctgtttctgtagaagattcaggcgtcgctgttacttcctcagcagatgcagatggagcacccgcaacaaatagggcagtccctagcaaaactgaacagacacccacactatacttgcgcaaagaaaagcgctgtcgtctattaaatatatctttcacttatatcattctccttattcatttcatggcaaaaccatacataaatcatagtatcaaaaaggtaaaaaagctgtcaaactaatgaaccaaaagattccaaagccttcgtcttttgcacaaattagctagtatttctgaaaacttaaagcataaatatcatattttttccccaatcgtgcaatttctcaatctagaaagcaacactggcctgacggggaatggaatagcttgtaaactttttacaaatgtacctgttgaatccatccagtatccacatcataaactgcccctgaaatcactacgtcatttggaatcagtggagaccttttgaggagcaacatatcttcacgaacactctcttcaacatcttgaaaaggtaggaaatcttgatccccaacctcaacaccgagttccttctttagatgctggcgaaaggcttcgttttcaaaggtttgagcgccacaatctgtgtggtgtaagactacgatttctcgggttcccatctgttgctgagagatgaccagggaccggatcatatcttccgtcacgcgcccaccagcattccgtaaaatatgggcatctccgagagcaagaccaagtgctggcgctacgtgaagacgggaatccatgcaagtcacaatcgccacttgcgttttcggcttgataggaagatgaagatctccgtgtagttcaacataagcttgattagcttttaaaaaattctcaaagtaggacatggccacttcctttctggaaaacaaagtattttgatttccaaattatttataccctatcttaccatctttccgttagcttgtcagctgattctagtctgcctagccaaaaaccttcttcaagacttcaccaatggtcgtcacaccaattacctgaatcccagctggcgaggtaatccccgtcagagaatttttcggaacataaatcttggtaaaaccaagtttagcagcttcattgatccgttgctcgatccggttgacccggcggacttctccagtcaagcccaactctccaacgaaacactcttgcgggttggttggcttgtccttgtagctggaggcaatggctacggccacggctaggtcgatagctggctcatccaatttgacgccacctgcagacttaagataggcatcctgattttggagcaagaggcctgcgcgtttttctaacaccgccatgatgagactggcccgattgaaatcaagccctgtcgtcgtccgcttggcatttccaaacatagttggcgtcaccaaggcctgcacttcggctagaatcggacgtgttccctccatagtaactacgatagaggatccagtcgcgccatctaaacgctcttctagaaagacctgactaggattaaggacctcgaccaggccacctgattgcatctcgaagatcccaatctcattggtcgagccaaagcggtttttgacggctctcaggattcggaaggtatggtggcgttcgccttcaaagtagagcaccgtatccaccatatgctccagcatcctaggccctgccaaggtcccttctttggtcacatgaccgacaataaagatggcaatgttattagtcttagccagttgcatgagctcagctgttacctctcgcacctgagagactgacccctgcacccctgaaatttcaggagacatgatggtctggattgagtcaataatgaggaaatctggctggatgcgctctacttctgctcgcacgctctgcatattggtctcagcataaagataaaactcactgtcgatatcccccaagcgctctgctcggagtttaatctgctgggccgactcctctccactgacatagaggaccgttcccacttgagacagttgtgtggagacttgaaggagcagggtcgatttcccaatccctggatcccccccgatgagaacgagactccctgggaccactcctccaccgagtacacggttgaattcctccatctccgtcttggtccggtgaacattgatagaggtcacgtccgccaatttcatgggtttggtcttttcacccgtcaaggatacccgtgaattcttgacctctgcgacctcgacctcctcgaaaaaagaagaccaagaaccacagttaggacagcgccctaggtatttgggtgaattataggcacaattttgacaaataaatgtcgtttttttcttagcgatgataaacctctttctaaatctctatctcacactcaatcacttgacaaaaatcaatcttctcatttggcacaaactggcgcatgagcattccgtgagttacaatgataatagttttataatttttatatttttccaaagctcttaaaaaacgatggcgcatctctatatcagtttcatagcgataaggagaatcttcagataaacctccttgatgttttagataatattcatgagctaccaatacactagttaaatcagagttagtgccatctaagtctggacgccactcatgaaaaaatggctccacaaataagtccaatcctgtttcaactgctatataatgtgctgtttctaaagccctcgtcacagacgatgaaataataatctctgcctttccaaaacatgcagttttagcaacttcttttgccagactgcgaccttttcctgtcaatggtgctaaatcacgaccaaaaccactatagagttgcggattttcaagtttatcaagcatactataatctggctccccatgacggacaaagataatcttcatcttagtgcccagttgatccaaagccaccagtccgcacgccgtctgcctcatctccatctgcaattaagaaaggagcaaagacagcctgaactacacgttccccaacttcaaggacgacttcttggtccgtgatatttttcatctgagcaaagatatggccttcatttcctggattaccatagtagtctccatcaatgaccccaacagagttaatcaagaccaatccctttttacgagggttagaggaacgatcatagagatagagcacctcgcccgcttgcatataggccttaacaccagtcggaacgaggacgatttccccaggagcaatgactgtgcgctcggccacttttaagtcgtagcctgctgcgtgggctgtctcccgttttggtagtaagtcctgattggtatagcttgatacaagttcaaatccacgaatttttgtcatcttcatttcctttctttccactagaaaatttaaaatatctcgcatcctattatactacatctgtaagcaaaaaatactgtggtctcacttatattattcgcaagacagtcggaaaaagtttaattccaatttttggggtcatccttttactctgcctgtagataatgggtgtgctcctgagacagaaccctgcttatcatgcgattttatgcttgttatttaaaaagagaggctgggacaaaagtcctagcctctcaattatttttggattgtcgagcaagacgcagtggttgagtgggctctactacgccgatttcatcagcttttacagccctactcaactgtgcggaggtgggacgacgaaatagaattctaacgaattaccgatttctgtcccactctctccttaataattgcataatacccttcaaccgaaatttggttgggcaatcaattattcattttcatctcttttacgttttgcaagacctactaaacctactaaaccaagtgcagcacctaacagagttactgtgcttgcatcagtcacacctgtttctggtaaagctggtgcttttggagcatcaggtgttgctggttttgttggttctggcttcactggttctggtttaaccggatttggcttcactggttctggtttaactggatctggtttaaccggatctggtttcactggatctggttgaggagttgggacagctttctttctatacaagacagttgtcacaaaatctttgctttcagctgttaaaccagtgatggcatccaccaccagtggacttgcttcataaccttcaataacaggagatgtcactgcatcaaaagttgtgtctccattatctgcaacccaagaagtagcactaaggacttcattggttgctggattaaccatcaccacacgacggaaagttacttggtctgtatgatctggagccagagtttctcccgtaatagcatctttatagtgaatagtttcgttaactactttggtttcttgacgagggacagcttgaagttccaaaagaatggtggtgttgcgaccaatcgcatctggatctgttggattattcggatctacagttcctgcagttgcatcgtacccatagactgtttgcccttctttgatcttgtaaccagctggaattgcaggaagtgctgtaggagctgcctttgttgcatctgtttcattgttcttatagattgtttccgccaagacatttccattttgatctaccaactgaatattaccaagcttgaataattgaacattgtcagtataaatcgttttaacttctgcagaaccataaccatcctccggtatatacagaactgcatcaacctctttcacctttgtgtaggctcctggagttacaggcgtaggaactttaataaatgtatagttaccacttgaaggcacctctggggcatctgctaaggcacgacgtgaacgtgtccgcggtgctacactttccaaacttgctacttctgtatgagatacagaagcatctgccaaggagcgacgtgagcgagttcgcgctgtagctcttgccaaacttgctacttctgtgtgagatacaggagcgtctgccaaggaacgacgtgagcgagttcgtggagtatttggctcattatctgaaattggagtcgcactaacaaacttccatgcctgaggtgtcatttctccagttaccaaattgacaaggataatccgctcgaagaccactcgttcacggaccggtttcggtacgataatgccatcttctttagtaaagtaatttacagtacgtgtcgcaatggcacgacgatttaagatcttatcaacgttcttcggccaatttggtgtgtttggatctgttggatcgtatggagtatccggagttggatttggatcctccggtcctactggtaccacacgttcacgtacaactaccgtgaattcttgatccactgatgcatcaaagtcgaagttcttgtttgcagcacttgtgaaaccatcacttaccaattcgtaacctttacgatggagttcgttaatcttatcagtagtggtgtaagcaatcacttcacccgatttaccattaacagtatcgcgagctacctcaacattgcctttttcattgacatacttgatgatcgctttttgtgcatctttaacgtaggttacaacttctacagtatctgcagctccggcttgtacacctgacacagctggcacaaccaatttatctgctgtgtaacctttaatcactggtgatgtaacggcatcaaaggtgtcatctgttgttgtccaaggacggtaatcaatgtgacctgttaccaagttgacataagcgaagcgtttgaagcgaagtgtttctgacacatcttctttcgcttttgagccatcttcgtagacatatttcacagtacgagtgacatcatctttgttaacaatgtctttgactggatctggccattttggtgtatctggatcgtttggatcaactggtttgtctggagttggagttggtttgtctggatcgattggttcgatacgttcacgaagaacaacggtgaattcttgatcaactgatgcatcgaagtcgaagttcttgcttgaagcacttgtgaagccatcgcttaccaattcataaccttggcgtttgtatgatgaaatcttagctgctgtgctgtagttaattgcttcaccggatttaccagcaactgcatcacgactcaactcaacattgcctttttcattgacatacttgatgatcgctttttgtgcatctttaacgtaggttacaacttctacagtgtccgcagctccggcttgtacacctgacacagctggcacaaccaatttatctgctgtataacccttaatcactggtgatgtaacagcatcaaaggtgtcatctgttgttgtccaaggacggtaatcaatgtgacctgttaccaagttgacataagcgaagcgtttgaagtgaagtgtttctgacacatcttctttcgcttttgagccatcttcgtagacatatttcacagtacgagtgacatcatctttgttaacaatgtctttgactggatctggccattttggtgtatctggatcatttggatcaactggtttgtctggggttggagttggtttgtctggatcgattggttcgatacgttcacgaagaacgacggtaaattcttgatccactgatgcatcgaagtcgaagttcttgcttgaagcacttgtgaaaccatcgcttaccaattcaaaaccacgacgacgataggagctcactttttcatttgtgctataatcaatcgcttcaccggatttaccgactacttcgtcacggctcaactcaacattacctttttcattgacatacttgatgatcgctttttgtgcatctttgacataggttacaacttctacagtgtccgcagctccggcttgtacacctgacacagctggcacaaccaatttatctgcggtgtaacctttaatcactggtgatgtaacggcatcaaaggtgtcatctgttgttgtccaaggacggtaatcaatgtgacctgttaccaagttgacataagcgaagcgtttgaagtgaagtgtttctgacacatcttctttcgcttttgagccatcttcgtagacatatttcacagtacgagtgacatcatctttgttaacaatgtctttgactggatctggccattttggtgtatctggatcgtttggatcaactggtttgtctggagttggagttggtttgtctggatcgattggttcgatacgttcacgaagaacaacggtgaattcttggtcaaatgctgtatcaaagtcaaagttcttgtttgaagcacttgtgaagccatcacttaccaattcgtaaccttgacgtttgtatgatgaaatcttagttgctgtactatagttgatagcatcacctgatttaccaagaacctcatcacgactcaactcaacattgcctttttcattgacatatttgacgatcgctttttgtgcatctttgacgtaggttacagtttcttcaatatcaggcgcagtaggttcaacccctgttacagcagggatcatatttttatcagccgtatatcctttgatagttggtgtaagcacagagtcaaatgttcgatcatttgaagtccattggcgataatctacatgaccggttaccaagttaacataagcgaaacgtttaaagtaaagtgtttcagtaacatcgtccttcgcttttgaaccatcttcataaacataatggattgtccgagttacagtttctttattgacaatatccttgactggatctggccattttggtgtatctggatcgtttggatcaactggtttgtctggggttggggttggtttatctggatcgattggttcgatacgttcacgaagcgttacgacaaattcttgatccactgatgcatcaaagtcaaagtttttattgacagaatttgtgaaaccatcattcactaattcataaccttgacgtttgtatgatgaaatcttagctgctgtgctgtagtcaattgcttcaccggatttaccagcaactgcatcacgactcaactcaacattacctttttcattgacatacttgatgatcgctttttgtgcatctttgacataggttacaacttctacagtatctgcagctccggcttgtacacctgacacagctggcacaaccaatttatctgctgtataacccttaatcactggtgatgtaacagcatcaaaggtgtcatctgttgttgtccaaggacggtaatcaatgtgacctgttaccaagttgacataagcgaagcgtttgaagtgaagtgtttcagtaacatcattcttcgcttttgagccatcttcgtagacatatttcacagtacgagtgacatcatctttgttaacaacgtctttgactggatctggccattttggtgtatctggatcgtttggatcaactggtttgtctggggttggagttggtttgtctggatcgattggttcgatacgttcacgaagaacaacggtgaattcttgatccactgatgcatcgaagtcgaagttcttgcttgaagcacttgtgaagccatcgcttaccaattcataaccttgacgtttgtatgatgaaatcttagctgctgtgctgtagtcaattgcttcaccggatttaccagcaactgcatcacgactcaactctacattgcctttttcattgacatacttgatgatcgctttttgtgcatccttgacataggttacaacttctacagtatctgcagctccggcttgtacacctgacacagctggcacaaccaatttatctgctgtgtaacccttaattactggtgatgtaacagcatcgaaggtatcatctgttgttgtccaaggacggtaatcaatgtggcctgttaccaagttgacataggagaagcgtttgaagtgaagtgtttctgacacatcattcttcgcttttgaaccatcttcgtagacatatttcacagtacgagtgacatcatctttgttaacaatgtctttgactggatctggccattttggtgtatctggatcttttggatcaaccggttgatctggggttggggttggtttatctggatcaattggttcgatacgttcacgaagaacgacagtaaattcttgatccactgatgcatcaaagtcgaagttcttattagcagcatcatagaagccatcacttaccaattcaaaaccacgacgacgataggagctcactttttcgtttgtgctataatcaatcgcttcaccagatttaccgactacttcgtcacggctcaattctacattgccattttcgttcacatatttgatgatcgctttttgagcttgttttacaatgacaattcttgtatctctaccaaccgcatctaagtcatctttttggttcggattcaccgtttgacgtgctgcatcataaccatacacattttgacccggcttcacttcccagccagttggaatagtaggaacttttgtaaaccaggcacgagttggatctgatggatcattctcatattgtttgtgcgctgcatcagcctggtttgcagtggtttcacccgttggggtaatatagtttccttgttcatccactaatacaactgatccgagtttcttataccacacattgaaaacaaaatcatcaatatttgtaggatcaacaacaagagcttctatactggctttatctgcataaaatccaggaaggattggtgtcatgaccttcttaaattcataatctggattttctgatgttccagcccccgcttctcggaaactactacgtctattgtaattacgacgtcttgcaatatacgcttccaatgaagcacgatattgttcttgagcttcttttgaaaatgcaatattaaaaccgccatcaggattttctgtagcattcttaagatcaagaccaggaacttttttatctacatccaattgctccttcttaagatcaactggtttatcttctgattttttatcggtagaatctgcttttttctcagcttccttcacttctgattcttcagatttcacttcagtttcaggtgcttttacttctgatactgtttcttccgttttcgcttcgttcttgctatccttggcattttctttcacttctgcctgagaagcttgttctttagcaggtgtttctgtttttgcttccacctttggtgcttccgctttttcagtagataccaaagccgcattagcagaataagtaggtgcttcttgtgtagatgcttcttgagcagaaactgccgacacctttggtgcttcttgtgtcgaagtcacaggtgcttttgaggcatcatcaattttcacttccgtatctgctgaagcaatagttgtccctgctaaaactgatccaatcaaaacagaagcaacacctatagagtatttccgaattgaaaatcgttgtttcctatcaaaattcatttttttctccttttttcaaattgagtattggctatgctagctttttaaaactgcacaaccaatcctccttgatgtttcctaaacttttggtggacgacgcgagcttctgccacgtgtcaacactggtttcgcaacataaacatgcttattcgcaacaagaggtgctctacgagacggaccatccactgtccgtttttcaacagctggtgattcacttggtacaagtggtgctggactctcaacagcttttgtctctgttggcttcacaactttagtcggagccggtgaaacaaccttcggactaacacttgctttttgaggcgctggagttgctacaacctctgaagcttctagttttgaagcaataggtgcgcttgaaggtgctacagaatgagcattagctttcaaacttcttgcacttggttttggtgcaaccgcatgagggcgagatacttcagacgaagagttcccaacaggttgaaccggcccctcctcattcacaatcttagcaatacgccaattagagtaatcgatatgtcctgtcactaagttgacataagctgttctttcgaatgtcaccttgcgaataatcgtcttaaagacttcttttccactttcttcttctctgaagcggattgtttgcgttgctgtacgttccagctccttcatatccttgacttcttttggccaactagctggatcctctggagttactggaatacctggaactggttttggatcttgtggtgttactggttcaatccgttcttcaagagtaacgatgaattcttggtcaacagacacatttgtatcataatgcttgtccgcagcattcgtaaagccatcttcaagaagtcgataacccgctttcttataagcagtaattctatcagctgtactgtactcaatcagagctccaccacggccttccatctcatcttttgcaagttcgatatttgaagtgacgttaacatatttaacacttgctttttgcttatcttgcttataaacgacaactgtctcataattcgtcaattggacattgtctacaatgttccgccaatatgtttctgagactgtacgacgaccaccctgagtcacaacaacatcatctttaatatttgcaggattaaatgtcaccgttacacggctagctttcgttcccactgccaaacctggtacgttcgtagatagaatttcagctttatagccttcaacttcaggcgagacaacagtatcataggttgccttactatttgtagtacccgcaagttgccagccagtgtctccaatgccatccccatcaatatcacggacgatatattctgtcttaccataggcagctaagaattcatccccattcgctacactggaactcttcagtaccttcttgaattgatcttgatcaattgccacttctaatagacgtttccaatccgatgtttgaacaacaacttttggttttccatttgcatctaaaacaggtgaaccatcttcataaacgtaacgaatcgtatttgtatgagttgcatgtggattaatacttgttccatttgatacccagatattttggcggtttgctgtgactggatcaattccatatgtcttatccgttgcaagaaccccacctgaagaagaacctgtttgaacagaggtggatgagctaggattgatttctggttttccaccaggtttaaagccggcaatactcattgccccaccttggatatctgtccaaactgaactcattctgtttctgctcacaacatctcgaccatcacggttcagtgagtatactgtataagtacccgcaccactgtttacacgagtaccagttggtccattaaattcaatatggttaccagattctcttgaaccattggaaatataaagaatgttaccatgaccaatttgttctggattgtttccttgggcaattccaaatggaagcttacctgtaatctctccagccgagcgtccttcagaatttgtgtaacgcataaaggaaacatagagcggattattgaattggaagactacattcgtacttgcacccagtggcaccgaaatgagctctgcataatagtccgtattatcatcacgaacgtcaacaattgaacctttattcgcttggaataacggctgatctttccaaccatgttttgaatccaagttgatgacatcatcccaaggattggctccacgattatccatctgaacacggaaagttgcataatcatctactaaaatagagccattttcattcaagccaatatagttgtaggcattgtaacttcctgaaggtcctccaccactcttaggaccttttcctacagagtggaaggtattcgttgatttcttaccaaatacaacgcgtgagttgtctccaaaatcaatagctgttccacgccccttgttttcaaaacgaacgcgtgagttctctccagttgtgaaggttgcgttatttccaaaaaccaatccatcgcgaccagtgaaattgaagcttgcatgttctccaatggtaaggctactcttcccatttcgacggaaggcatttcctgttccgtagcctccccagcgatctaggtgtgttaaaccatctgctggacgtcccattccaagtgagatagcctgaccaatgcttgtatttagagtaagtttcgaatctttaccagttacgaccgttcctccatgttccatgaagatcccagcattatggtaacgagcactttccgttccattgtccgtattcatgttaatggtgaggcttgctccatcattcacacgaacagttgaaccacctgcaaggttgataccgtccccttgtgaagaacgattcaaggtcaaactcgctccgtcagcaactgtgacagatttagcatcgtgaatatttgcttcacgacgcaatactgagtgcccagcagatccaacattccgttgcacatactgagtctgaccgtttgcagaacggtagctatcactaacagtcgaacttgtttccccttttacaatgacgtcggtattcccgccaccaccataaagggaagaaccttgactttttacattttcaaatgtaacggtattggctcctgttgttgaagaaagatcaacagcaccttttgagttacctgtagcaagttgaagattcttgaagaccaaattccatgcacttgaacctgtaaacttcaagctatttgataaaagatccaagcttgcttgatcatttcgaccttggataactacattacggccttgtgagttgatcgcaactgtacggtcaaccgaattcgcacgaccattatcagtattaccattgtctccagtcgctacgacgtttcctgaaatggtgatattctgaatagaattatcattcaatgcagaaacaaaaccattccagtttgaaaccacacgtgaagttacttcaccactattacgaaaaccactcgtacctgttgcttcacgagatccagtttcagttggctcagctgtagcttccttccctgcttccttatcaccctcatgttgcgaatcagtagctacagaaggttgcacaactgctgcaacattgtacgaagttggggcagatgattcccctgtgaccggttttgaaagagcaatctctttgtccgatgtcgcttcactagaaattacatctgaagacgaatcagcaggattttcaacttcatcagccaaaactgtctgagaaccagctgcaaacaaggccgttcccaacaatacggaacaaacgccaatagaatatttccgaagggaaaacctttggcgtcgattgaatatatccttcatgtccataaaactccttttcattttgaaatttaaatatttaaacctcaaattaattctagcataaatgtcatgagatgattcagtgtgtgccaaattctgtcaaatttatatcattttgagctttttttctaaaatttgtttaaaaatataaagtaaaaaccgaatgtttttaaaaaattataatttttaagaactattggtttacttttttaaacatgtattttatactgtcatagatctttatttttttattcctactatttttaatcctccttccatttgcatttccatctcctctacatccgctttttacccatattttataagaactttcgacgattattttaaactttctacattattagaaaatcagatgagagataaaacgatatcattttcccacatttccttcaggaaaactctccctttggtctattttcactacatagtaatttacgaacattctaaacaaaattttcaaaaacgatcttttttccaccaatttcttgtgtgccattttttcacatataaaccacagtatttcattagatcctttctcatcttgtaatgagcagtgaatcatttctatcaaactatgaggagagtgctcatcttttgatagcctacaaaaatgcaacaacggccttgtccctcttaaaacgaggaacaaggccgttgctcaatcttttatacattcattttctacttgataaaaggtccttccgttatagaacttcgtgtgcgcattacaattcctgtaataaataacggaagagttctaaattcccttcttcttcattgaccaagtattctggatgccattgtaatcccataatccgatgaccgtctactgcttcaatggcttctatggtgtgatcacgcggatcaaaggcagttgcacggaaatttggtgcaagatccttgatactttgacggtgcacagaattgattcgactagcccgaccaaagagctgctccaccacactgccttttttagtctcgatagaatgggaagtcccaaacggaagtccttgccaatgcccttcaatctcttggttgagtgttcccccaaaagccacattgatcaattgaaccccacggcagattcctagaaccggtttgttttggcgtactgcttccttcagcagggcaagctcaaattgatcccgttcgatattgtaatcatcgctctcaatggttttttcttcgccatagagactaggatcgacattttggcctccacttaagatcaatttgtcaatcgtttcaacatagtccttaaccaaggaaggatctcccatcgggatgaccattggaagtcctcctgcttgacggatcccttccgcaaactgactagacacggaggaatgaaggtttttcccttccgggtcaaccggacagagattagcggatactccaacaattgttctacacatattcattcctccttcattttaactactacttatcttaccacccattagtgatcgtgtctaatatgtattttttaaaaccgtgataaattttatttatcaccctcaccttcctcacaaaacaattgatgatcatacaagtttttttacctatattatgttaaaatagagaggaaaatagaatcgtccttcaaggcacacattaggccgtttcgaaggcgcaagcgctagattcctagccttgttgaaaaatagacatagaaatggaagatacaatggaaaaacaaaccgttgcagtattgggtcctggttcatggggaacagccctttcacaagtcctcaatgataacggccatgaagtccgtctctggggaaatatccaagaacaaatcgatgaaatcaataccgctcataccaatcaacgctatttcaaagacatcgttattagcgatcaaattaccgctacgactgatctgaaagctgccttggacggagtagacgctatcctttttgtagttcctacaaaggtgacccgcttggtcgcaaaacaagtcgctgaaacactagatcaccctgtaacagtgatgcacgcttctaaagggctagaacctggtacacacgatcggatttctcaaatccttgaagaagaaattcctgcttctcttcgcagtgaggtagtggtcgtctctggaccgagtcatgcagaggagaccatcgtacgggatatcaccctcattacagcagcttcaaaagatttagaggctgcacgctatgtccaagaactctttagcaatcactacttccgcctgtataccaatacagatgtcatcggagtggaaactgctggagccttgaagaatatcatcgctgtcggagctggggccctgcacggtcttggttatggtgacaatgccaaagcagccatcatcacgcgcggtctcgctgaaatcacgcgccttggcgttaaactcggagctagcccattgacttatagcggtttatctggggtcggtgacttgatcgttaccggaacttctgttcactcccgtaactggcgagctggggatgctctcggacgtgggggaaaattggaagatatcgaagccaacatgggcatgattattgaaggaatctctacgacaaaagtcgcctatgagctggcgcaagaattggatgtctatatgccgattacacaagctatttaccaagtcatctatgaaggaaaagatattcgcgaagccattcaccacatgatgagcaatgaatttaaagaagaaaacgagtggaaataagttaaccaccctaacatcaatcctaccttttagaaaggaaactatatgactaaagttagaaaagcagtcattcctgcggctggtttggggacacgcttcctcccggctactaaagccttggccaaggaaatgttgccaatcgttgacaaacctacgatccaatttatcgtagaagaggctctgaaatctgggattgaggaaatccttgtcgtaacagggaaggccaaacgttcgatcgaagaccatttcgattctaacttcgaattagaatacaatctcgagcaaaaaggcaagactgacttactcaagttggtcaatgatacaacagcgatcaatcttcacttcatccgccaaagtcaccctcgaggtttaggagacgcggttcttcaagccaaggcctttgttggaaacgagccttttgtcgtcatgctgggagatgacctcatggacatcactaatgatgatgccttgccacttaccaaacaattgatgaacgactacgatgaaacccatgcgtcaactatcgctgtgatggaagtccctcacgaagaggtttcttcttacggtgtgatcgcacctcaaggcgaagggattaacggtctttatagcgttgaaacttttgtcgaaaaaccaaacccagaggatgcgccaagtaatctcgctatcattggacgctacctcttaactcctgagatctttgcgatccttgaaaatcaagaaccaggtgctggaaatgaaattcaattgacggatgcgattgacacgctcaataaaacacagcgcgtctttgctcgtgaattcactggagatcgctatgacgtcggtgataaattcggctttatgaaaacttcgatcgactatgccttgaaacaccctcaagtcaaagatgatctcaaacaatatattatcgaactcggaaaagaattagaagcgtctgaaaaaactgcagactaatcattcacaaatccaaagaatactaaagagactggccaacagatgtaagggtcttcccaccttacaaacagccaatctcttttttgttataaaaaagaagccggacttttcgcccagcctcttccattaataagacttcgtctatttaatttttctaatccttatttttaaggatgtacattatatgagtagtttgtattttggaatgtaccagcacttgctacatcataagaagaaccaaaacgattattttcattgccaccattacctgcagatacagcttcagatggatcttgaaccttttcttcaggtttcacaaatgtttcaactcttgtagaaacataagattccttatcttttgtagctgcataaccaaagcggttatttggattgccttccgcattgacttttgtttgaattggaagtggttttttaggttctactaccggattgtttggattcacttctggttttgttccaggatccggtttttctggtgtcacaggattttctggatctttgtaattatctggcaatgatgcacgatatgggtcatccttgcgtccagcttcaactaaacgagcatgcatgtctgcttcataagatttgaagtgttcaaacatcttcttagatagtgcaagagcatttgctgtaacttcatcttctactgctttagcagcttctggattgtctttcagagctttatatttcgcatcactagcttcttgttcaataatcaattgtttttccaatgctttccagtgatcttgaacagttttaccaaagatatcttgattattgatcgccatgttgtcaatatgccatactgtccaataccatgaattcggatcataggtagcagtttgaggtttaaaagccttataggtatcttttacatttccatagaatggaacatacggagtgttccgagatggtcccataccaagccataaagtaccaccaaatgattttggaaggtttggattgatttggtagacatgggcatcgatgacgttttcatttcctaaagcatacttgtattggtctttccgaacagtatcgttactaccattgtctccttgtttcttgacaccaatttgatcatctggtacaaaacgaccattcaaatgttcaaaacggttccgttggaaagcaaaagcatcttccaaagtaaatttcttgttaggatctgttggtgagcggaagagttcatactcatcatcttcataggtcactttcgattttggatccaaaagggtgattcctgcataagtacgtgaacggtccccttcagcatatttatctggtccataagattttgcaatatggaagttgccatctttgtctgtcttgtagttaccagattctttggctactttttcaacatctttcgaagcgatcacattttccttgtcatttaaatcaacatgaccaaggtaataggtatttgcaaagactgcgtatttgtcttctgggacttttaccgctacatattggtgaccagaaagaatttccatataccaagtttctttttggtctgcaaaaacgacaacattcccttctgctgatcctttttcttcaatgattttagctaggaattcaaccccttcacgagcagacttaacgcgcggtaaaaccacgtccaacatagcagcttctggaattccgttttctgtcaatgggtcggtcttcaagacttttttgtttggaattgctgtaacagttgatgtcatagagacgccggcttcgttaaatccgtgttcaccaaaggcaccgttactaccatctccacgagcagagtcataagtcgctgtgtatttcatttcactagcagcatgtggataggtaaaaccattggattcgtcttccagttgatccccttccttatagttcttcgcatcaacaaccacaaagtttttgttgtgctttccaccatttggatagtaagggtagtcttctgtccgaccaaagagagtggtcccatccttggtcaattgccgaccaatgataaaaccacaacaggcttgaacagcttgaatcggtaggagcaaaagtgtcatcgctaccaatgagagttttaacaaccattttttcatggcaaatctccttcattttttgtactcttcttaacataagagtacatttttgatttttatacctccagtctacacctttttccaagttattgcaagcgctttctaaagtgaatttttatacctatcttaggactgacaagccatatactcccaaactaactcactatttatttgaatttcttaattatattattataaaaacatagaatttattataattcaatcaattttctgtcagtttacagtttgactacattttttagaaaaaaaggaggttgggacaaaagtcctagcctctcaattatttttggattgtcgagcaagacgcagtggttgagtgggctctactacgctaatttcatcagcttttacagccctactcaactgtgcggaggtgggacgacgaaatcgatttctaacgaattaccgatttctgtcccactctctcttaaaatagattcaagattttacctaagaaataaagcaaaagcaagagataagataggactgcactaatctgataggttcggttcataaaacgagcttcccctcttactggaaagacataagccaacatcagtccagctactaatccaccgatgtgccccaccatactgattcctggcatgaagctaaagatcaaattgacgacaatcaagctagtataggactgactcaagtgtcgaatataaggactttggacaataaagcgtagagcaccaatagtcccaaacagtccaaagagggctgtagaagctcctgctgcaatcacatctggcgtaaaaatagcaacaaagacattacccatcatgcctgataagagataaagagctaagaaagccttcgatccaaagagatcttctgccaaacgtcccaagtaatagagggtgatcatattgagcacaaaatgttctaggccgatatgaacaaatgtagctgtcactattcgccaaaattggctaggatcgactttcacaacctctccaataataccaccgctatagtaaacagcagcacctgtttggtagtcacttccaaatcggataaacatggaaagaaagactgccgttgtgacgagcaacaagaggctggtcacaggataacgacgatcaaagagtaacttcatagactagcacctcctgaactgcctgatcaaaagcatctggctggaactccttctgctggatggaataaatcgtactaaccgtttttccagcaaaatctgctaaataacgatcataatagccaccaccatagccaattcggtagccttttgactggaagaccaagcctggtacatggatcagatcaatctctgactgatccacaagctttcctttttcattgggctccagcaaaccaaagcgtgtcttttccaaaatgtcaggatcgtattccacaaattccatccgcccttgtggataggtacggggaacacagacgcgttttccaagttgaagagcagcttggatcaagccagctgtggaaacttcatgatcaaaagacagataggtcgcaagggtctttgcctcctgaaaagctggtagctccaagaggcgttgagtcagctcttcatctgcttgagttttcacagtttgcggcagtgctttcatagctgcaatcgtctgatttcgtagtgttttcttcatgcctactccttttgtctagcttttattgtatcattttttaggaaagatccgaacagtttttatacgacaaagaaaaaatccaactccagacggagttgaatctatcctttattggttggccttcattttcaaaaatttaccaatgttttccacagcaaagggaagggctgcttcatttgggctcatcttcggatggtgcagggcataaggggtatcaatccccaaccagaacatgaccccagggaccttgctcaagagaaagccaaagtcttctcctgtcatcgcaggcaggatatcaatcaagttcacgtctttctcagctgtgaaaaagtccatgagttctttggccaattctggttggttttccacaggcaggtaacctccttgcttgagttccaggtccaattttacatcaaaagcagctgcaactccttctgcaatggctttgacccgtttttgagtcaggaggttcatctccatggtcaaggtccgaatggtcccatgaaggaaggccgtctcagcgatcacattattggttgtccctgcatgcatggaaccaaaggtcaccacagccccttcaatcggatcgacatttcgactcacgactgattggacttgggtaatgaagtaagaggctgctacaagagcgtcattggcctcatgtggaaaggcggcatgccctccctttcctgtaaaggtgatcttgacttcacaggtccctgcaaaaagggtacccgtattggtcgcaatgtcccccaccttcaaatcagggcgcacatgcagaccataaaattcgtcaggaagccagtcgccaaaagcattgtccttatacatgagcatcccaccagcttcgttttcttcagctggttggaataaaaagagcaggttgtttttgggttgtacttgaaccagttgatccaaaagcccaagagctgtcgtcatgtgcatatcatgaccacaagcatgcatccgtccttcgtgcttagaggcaaaatcaaggcccgtttgttccacaataggtaagccatcgatatccgtccgccagccgatagttttttcaggtgcagccccatggagataaaccaggatcccagtccgccaagtccgttgctctacaaagtccttgcccgctgtgatctctgcgattcgctctaagaggtaggcttgggtttcaaattcttccaagccaatttcagggatttggtgcaaatcccgtctgattttgattaaatccaatgtcatagtcgtcttctttctattagaatagaggccttgcggcctctaccattcctatcttacaaattacgcaaggcgtcttcgagtgctgttttttgttgtgttttttcgtcaatttccttgatgatgcgagctgggacaccagctacgaccacattttcaggaacatcttgagtaacgatagctccagcggcaacgacggatccgttccctacttgaaccccttcaatcacaactgcattggcaccaaccaagacattgtcaccaatccgaacaggctcagcagaagctggctcaatgacacccgcgagaacggcacctgcaccgatgtggctgtttttaccaactgttgcacggccaccaaggatagcccccatatcaatcatggttcctgcaccgatttcagcgccaatattgatgacagcacccatcattacgacagcattgtcttcgatggtcacttggtcacgaataatagcacccggttcgatacgcgcatttagatagcgcttatcaagcaagggaacagctgaattacggccatcttgttctaccacataatccttgttctctgtcaagttggcaagtagaggctcgatatctttccagtcaccgaacaaaacattgccaagcttggtgacagaagcaggaacagctgttgccaattccccttcaaaggttactttcacatttgttttcttttctgcatttccaataaaagcgataatttcttgagcagacattttttgtgctgtcataagattctccattcatttcaattaaaggtattcatattataccacaaacccaaagagatgaacaccttggctatcgttgaaaccgatggcgatgtaggcattctgaatcggcttcctttgaatggactcagggctctactagttatccttcgcaaatagactcgtgtgttcatttcgaaatacactccatctttgtttcccattgtcattcactttcagttattttagcaccagtttacttccctttttcttcaattccataactacttctggctctcctggcatttgataagtcgcttgaaaaccttctccaccatctagaagctcgccccaaaccaaacgttggggatttcctagtttcttaatgagctgggcaaattctgtacctttttttcctttttcggtagtgatttctttcttactagttaccttctcttttgcctctaataaattcgtcgcatcaaccatcgttaagcggtacccctggtctttctcttgttcaaaccacaaagtgacatttttcttctcttgatctgtctgtttggctacataggtcaaaacgagaaccgttttagagctattggctgttttagtgtaacgaactttttgagcctttccccatttagtcacaaccgtttccaagcgtgtccccgcttgtcggctctgtttcaaacgaaccttcaaattcaccacagcttcgatcgtccactgaaaccgcttggcttcttgttcgcctgtcaccagattttggtagtttttgggctggaaactggtgagggttctatcttccttgatatcagtatcctgttcttgcacctggatagtcgaaatcgacagtaaaagacctaaaacaaaacacaaagaaggtagtaagagttcttttctgttctttttgatccattctagcattcgctttaccccttcttactcaaacgatactggccactctgatcacgctcaaaagtcaaagataccaatccatctgtcacctggtaagacagggccaaaaggtgtttatcctgagttcgcgttaaactaagtgagttaggaagccctgattttttcaagacttcctctaccattgttcctttttcctttttcccatctagtgtctgatagcccgtaaaatctgccaacttcaaatcctttttcttcttgtagagagacgaatgagggacaaatccttgaactgcacttagataaaagacaccatcctgctcatgaaattctattttataaggatagattcctttcacaggagttccatagcctagctggacttgcgctccaaaactcgtatcttcttgtgtaaaactcgctgcttttccaagttttttgacgaatgcagataaagtcacccaatttttttgtgtttttccttctccccttgcaagctccagtgaaagcaaattttctagatccggctctttggaagaagaagcgacaaatcgctgactattttctttcatttgagacaaacccaacaagcgatcttttggcaaggttttaactggatgaatcataaaaaccaagctagcaccaacgacaaaagctagcaaagcacttgcagctttttggaggatccgcttatgatgttctatccactgtttcatttcttccatcctttatgctctttctattcaaactctttctattgtatagaaaattagcgtatttgtctcgtcttatgcgaaagaaagaggcacttgcctctttcttttattcatttatttagtagctgtctttactactcaagaggaaatctccgttttcttggcgaataaaggtcaagtccacatagtccccatttttcttttggaagtccatgagcatttccaccttgtctgaatcatcagatgaactcaccgtcagattgactgcatcaccgtatttttctaaaagctctttgtaagaggttcctccagcaccggtctcactatttccaactttgaatccatctgcaaagttatcctcaaccgtaagatttttcccaaattgattaaattcaaatttgacaagctgtaattgttttcccttcttagagaaggtcgctttaacctccttactatacgagctatcatcccagaataatttcaattctccactatcaaattgaacagaactagcctttccataagcgtcgaccatttcctcaggagtctccccatcatccgttccagtcaaaaactgaagttgctcgatatcagattgttcccagctaaaattggcttccgcatcttctgcggtcaattgctccaaatcgatattggaagaagaaccagactggttgcctgaccaagaagtctgctttctagatgatgatgtactagggctggcatgaccaattaaatagccactgactccaccgataaggagacccactaaaattccaagggcaaaacgaatagccttcttgtctgcagtatccatcggtcttccaacaggagaaagaggagcttgtggaataggtgtctcaggaacaggcactgtttgcggactaactggttcagatactgtgttttgaggagcttgaggcgcaggctggaatggaggagccggttgggaagcagcaactacatctggatgttctccaacagttgcttcatccacctttggaggctccaccgtttctgaaatggctgattcctttaattcctccttatcatctgttgcctctagctctggagttccctcagattctggaaccttcaagtcttcggcttcttcttttgggacaaaaactggcgcagccacatcaaaatgaggcgctccatctaagggagtatgtttcataaattgttcttgatctttctcagacatttcgaattctcctttttattcttctcttctactataacataaaaccaagcaaggaccaactcctgtctggatagactaaaaaagatcggaaagatatccgaccttttagaagcttatcttaaaatttcttgcgaagggtaacaatggcaagtcctgcaagtgagagcaagcccaatgttgccaaaacaacacctgtttcttgcccggtttttggcaataagcgtccaactacagatttgcttgagtcgcttgaatttgaggaagaactagacgaagaacttgagctcgatgacgaagtcgaacttgaggagcttgaagacgagctgcttgaagatgaactcgatgagctacttgagcttgaggaagagcttgagcttgaagatgagctacttgaagatgagcttgaacttgaagaaggacctgttgtacttggtgaagtcgtcgttccagttccagaatctctataacctacaatgaagttacgataaatcggattggaactttctaacgaacgaataatcaagtgcccccgtgcattacgatcaacgactactgtcacttcaccttccccattatccaactgttcaaaacgaccatcatccactgtcgtttgtcgaatgtagagtttaataattccagatctatacattgataggtccaagtcgctaaattggatcgtgccattttctgtattctgaccttgagcaactgtctcctcttcgccactctcagatttgtaaattaacgcaaattggtaggctcctgcatcatgcgcactttctttcttgccttcacgcgctcccactacatcgacacgacctgttttcaatttcaaaacaagtttatcagattcataatcttcataagacggctgttgcacaagatcgagattgccatttctatattcataaattgcagctttcgtcgtagcagaaactggatgggcaacagccattcccccaactaaagatgaaagcaataaaaattttgcaagattctttttcatattttcattcccttttagatcattttcatttttttacattttataatacgcctaatcaaatgacaacttttagagtcaaataactttttatattaaataatttgagtaaaatatcaatgttccactgattttactacatgagaaaaaacgattatatcaacgatcctgcagaaataatcaacaagcgatccgaaatttaaactatgtagtgttttttaaaaacgaaccaagagggaacttttttaaattttgctttcaaaaaaacgacctcttgcgagatcattttgtctattgattaaagacgagcgttgagttctgctccaagttcttcaaatcctggtttaccaagaagggcaaacatatttttcttgtaagcttcaacacctggttggtcaaatgggttgatcgcattcaagtaacctgaaagggcgattgccaattcgaagaagtagatggcataaccaagagtgaaggcatcttgctcaggaagagttacgtacatgtttggcacgtcaccgtcagtgtgggcaagaagaacaccgtcagttgcttttttgtttacgaagtcaacgtcttttccttggaggtaaccaagtccatcaaggtcttcttccaatgtagggatgatcacgttcttacgtggtttatccacacggacaactgtttcaaacatgatacgagttccttcttggataaattgacctaatgagtgcaagtctgttgagaagtttgctgaagttgggtaaatacctttttggtcttttccttctgttcaggcacaccttatggatgcatctgctggaaattcccttgcactggctggctagtttgattgacttcaagctctttgcgcttgaccttgaccgtctttttctggcatgcttttatccttataaattttgttgatttgtcatattgcgaaaacattgaaaaacaatgacaaattttacaatattaaaacataaattattttccctatcaaaaagggagtgggaaagaacttcaaacaagttaaaaagttcatcttcccacccccgcacagttgatcaggcaatctttggggcttaaaaagcgaaggaagatgccaatcaaccaccgcgtcatctattttttctaatttagacccagaagcctggactttttgtccaagctctgaatcaatttttttgacttttatgtttctaaattgcttgattttaaattttgttatggtcaagcagtttcgaaaatctgaatggtagagtccttttcaattactactgcttggtctgctgcaacatggagagtgcccggcaggctgccctcttttgaaccatcaaaagaaatcgtgatatggcccagtccagttaaatttttttctactacatttcctacggcagtaatcgaatattcctgactatctaccaccagctttccaccttctagtattgcacctagaagatttttgttatcgattttaaaacaatactctgctaagtcttccggagcttcttctccaaacaaaatgagcatattggcatcttgaatcatattctgagcttcaggccccacttgaattactttagcttcaaaaattttcttcatctaattcctattcatcctttctcaaatctgtcataaacttatgcttatagataagtttaacataatagttgctatgtttacgtgcatctatcaaaggtttactgataaaggccaatactagctatccaagctactagcacccgcggaacaccattgagaaagcgtgaataaagcacagaagggacaccaacctcaactgtttcagccttggcttcagatagaccgagtgctacaggaatgaaatcacaaccgttttgagtgttgatagcaaatatagctggcagagccatttggggcggaatattccctttgccgatttcaactccaattaaggttccaataatctgactgataacagctccggggcctaacaaaggagataggaatggcaaggaacagataaagccaatcaaaatgagtccccagatgttcccagctaggggaaccattaattttgccagccaatttccaacacctgaaccttgaataaccccaatcagcaaggaaacaaaggccatgaaaggaatgatcgtgttgagcattgtttggatggcttcacgagcagcctggttgaaagtcgcaacgaccttcccagcgcccatcccaattcttgctacaatacttgtttcagctttttgctctgtaatttttttactagtatcgtaagttggcttttctgttaccacagttgtcgctttttcgtcttcattagcagcagaaatttgattaaggccaactgctgacacatagatttcctcggttatatattgagctagaggcccacttttccctgtagctacaatatttattgtagggatcccctttttaggataaataccacagcgaagagtaccgccacaatccacgattgctaaagcaatttcctcatctgggatagaagttttaaacccattaacagcttccataccggtcaaatcagcaattttatccacaatatctggcttttctcctccgccagtgatatagatgaatttatgcttagcttcactaggtgtaatgaccaaaggtcctccgaaaccgccatttcctttaacaacttttatactcttatatgacataatttcactctttctataaatcaaatgttttactcaaggtaacaccttgctgttttgctacataagcagttgtaaaatcggtcacccaaccgcctacaaagttcatgacaagcccaacaagcatgtaacgaatggctaagtccatttgacttaaacctaaagtttgaattcctgttgcaattcccatccatacaaacaattccccaggattgatatgcggaaatacaccatttgaagtatggcagaactgcatctgagctgctacaaaactaggtttataatattctggtaagaaacgtcccatactgattgccatcggattccccagcataaaggctgaaatgaaaggtaaaatcatataccggctaacaggatttttggcagaaatcttagccagggaattgaccttctcttctcccaagaaagcgataagggtattcattgcaatcaatagcattaagacaagcggtacaatatttgtcatccagctaataaaggtttctccacctaattggaagagtttcataaaactctctgcaaaatttgtaatgtgattcataaggaactccctttcttattttttttaaataactgtttaatagataattgtaagtaattcgcataaaagccgaatcccagaaaagaatcagatgaacttgtctctttctcaatacctgcctcatgccaaagatagacttttctagcatcttctatggctgattgcatcaacttattttcttttctcacaagaggattatacttgtcaaaataatggatgtcttctccaacataatcgtccatattttgaaaacgtgctaagattgtgactccttgcattttgctagctttaagaacccgaccgttttcatcaaccgcgaacatgacaatcgtaccggatttgattcttccggacttcctgccaatcgctacgcgccccagtcttcggagcatcgtataggtcttattgaagtctttgagttgctgccagccgaggaacatttgaaatatataagctgccatgacaaatacagcgaaaattattagcgaattcattaaaatactcctttgctcttagaaaatgatagaaactctgtctctgtttctacagccctcaaagcttcttttagagaaggctctcctgcaattcgaaaaatgtcgtcatacaattccagcaattcactctccattttgctttcaatttctgagggaatggcgactagaaagataaattcaatccaatcatctcctttttgataaggctcttctagctttccaaacattaaaatagtctttgcataaccctggttaattgtatgggggaaggcaattcctccaccaaaaatggttgattgttttttctccctatcaattatccgatttctaaaaccttcatcaatcatctgaagtttctctaactctgcaaccatatttagcaagtattgctgataggttttttggggactcaaccgaagaaaacgtaagctgactgtttctagatttttttgatgaaaagcattggccctctgccattcttcccgcagccattgatcatcaaaaagatgattaacttgaatgactggagatttagaatctttatattttagaggaactgtcgtaaaaatcgcgaaatagtcctgattcaaatccagattaaaatcctcttcagaatactgagtaatgtctacatcatttccaaggattcgtctgagttgctgaataatcatcgcagcagttcctcttcctgttgtgcaaactactgctatctgcttgcgagaaccatttacaacagagttttgctttcttaaaatcatttcaaaatacaaagccagatatccgatttcagataattccaattcagaaccaaaaattgcagacagttcttctccagcaattttcgccatttcaaaagcaaaaggatattgagtttgaacctcgccatggaatatatcattagcttgcacatggaaaatcagtcgattgattaaggggcctagatgagacttgatttcttcaaataattcttcatcatcaaagttaaccaacattgtttctttgactttcttgacaatcccttgaaaaatgtttgcaagctgttcagattgataagacggcttgcttaaagtgtcaataaaacggatattaaacggaaaacacaaaaagtctatttcaaactgactgagggaaatcttataagtcatctcaatatgatagattaatttttcaaccaaaggtgtctctgttaaatcattcctatagtaaggaatagggcaactcaacaccctagatgcataaatacgctccaccataattgaaattgtctttcgaaggagttcctttgtttctttcgggattttatactcctggagtagcgtctccagaaaagaagatgttgcctcggtgagtgtctttccttcaaagtaaggggccacttggtgaatatagagcaagcgcaaattcagctcggaccacaagacctccagcccacggttgggctttcctgaaatagtgatagagtaactctctgccaaagattttacttgttttaaatccttattaagggtacttctactaacacctgcctcctcagccaagtcgtcaataagaagaggggaggttgacttaattaaacgttttagtaaataggcaattcttttactggaagaattgaagtcactctcccgttttaaactaccagataaaatcctttccaactcagtatagtcatacacctctaacattaacttatcatcttgtgagataatctggatactcggagccaaaacatcatttaattgttggatactcttttgcaaggtttgcatactaatatccagctctgagcgcatatctaccaaggaataagttggctgtgagaccattttttctaaaatgttataccatcgatttactatggtcaactctcttcctcaccttcatttttttaaccgcgagttttccccccggcaatatttgtagtgactccagttatatagctagaacggtctgaaatatagaatgctacaaggtcagctacttcccgtagtttaccacttcgtcccaaaggagttgttgaagttgaagcataaccagctcgaatatcttctaccgtctttccacgggtataagcaagagcttcctcataagaaagagttcgaagtcccgtagcttccataattcctggagcaattccaaccacacgtacaccatgcttacccagctcttttgcccatgaacgagtgtaactatagactgctgcttttgtggcagcataggcactttgtccttcagaaccttccaagcctgcttctgaagccatgttcacaattacaccttttccatttttcactaaaatacgtcccactgcctgactaaccagatacaaacctttttgattaatcatcgttactttttcgaacgtctcatcgtccaattcgtaaggacctttaggattttctgcatcgattaataatctagggatattaatccctgcattattgaccactgcatcaatattgccaaatctttcaactattttggcaacaccctcttctacttcagagcgagaagttacatcaacttttacaaataatagatttggatgacgcaaatcgttgtcgctaagatcgaaattcgctacattgacacctaattccagcaattcttcaacgattgccttaccgatcccagatgacgcgccagtcacaagaactgttttgccttttatgtttaaccaatcattcattttgatacctctcaaattttatttacaaggcaattatacagcgctttcataaaagaattaagacactcttttttatactgttcaaaaaaataataaactaattatgaggcttgtactaaaaaatccacaagaaatgaacttgtggatctctttttatactctaaatgaactcaaggcatataagaatcaaaggcgtgcattcagctcagcacccagctcttcaaagcctggttttccaagaagggcaaacatgtttttcttataagcctcaactccaggctggtcaaatggattgataccattcaggtagccagaaagagcaatagccaactcaaagaagtaaatagtgtagcccaaagtgaactcatcttgctcaggcagtgtcacaaacatatttggaactccaccatcagtgtgtgctaacagcactccatctgtagcttttttattgacaaagtcaacatcttttccttgcaagtagccaagaccgtccaagtcttctgccaattcaggaatcagcacatttttgcgaggtttatctacacgtacaactgtttcaaagaggatacgggtaccttcctggataaattgtcccagagagtgcaagtctgttgagaagttggctgaagttgggtaaatccctttttggtctttcccttctgactcaccagccagttgcttccaccactcagagaagtattgtagagatggttcatagttagctagaacttctgtcagataacctttacggtacaagatattgcgtacaactgcatattgatatgcttcattttcagccaacttatcagaagcataagccttgcgagcagcatttgctccttccattaacttgctgatatcagcccctgcagctgcgattggcaagagtcccactgctgtcaatactgtaaaacgaccacctacactatcaggcactacaaaagtatcccagccattagcatctgcttcaaccttaactgcacctttagcgcggtctgtagttgcataaatccgtttatttgcttcttcctgaccatacttcttaaccaagagttctttgaagacacggaaagcaatagcaggctctgtagtcgttcctgacttagaaataacgttgacagagaaatctttgtctgatacatagtctaccaaatcagccaaatagcttgaagaaatagaatttccagcatagaggatttgaggtgccttgcgttcttccttgctttgtagatttacaaaagaattattcaagaaatcaatagctgcacgagctcctaaataggaaccaccaataccgattacgatcaatacctcactatcagattggattttagcagcagccttttgaatacgagcaaattcatctttgtcatattcttcaggcaagttcaaccagccagtcatttctgccccaggacctgtaccatttcgcagagcagaatctgcagcagtcacttgaggctgcatataatctagttcatgtggtgctacaaatttatctaacacctttgagtagtcaaatttaatatgtgacatgtttatcctccaattgttcttttcttttatgataacgctttaagaaaaaataagcaagtgctttcactattttaaaacgtttacattttatattctatactatttttctaaataagctaaccttaggacataaccgagagcactcgtttgcgtaagacaacaaattttaggcctattgagaagaacaattttgattgacaagaaaacaaatacgcttcttaagattggatgtcagctgaattcatttcaggtccgttcaaactagattcgctgctccaatattcatctgcaccttttaggcttgattcattatacttcggaacctagttctcactttgttcgaactgcgtcaatgcacctaagttcatccgcgtccgttggacttgattcactaagggctatcataggtttacagctttttccctagcgggaaaaactgcatccattgctctaggattcttctgcgtcccttggacttgactcatcaagagcaatagaaaagagcacacagttcacttcgcttagggctgctggattcctcccctgacccgcttcacgcagaactgttgctccgataggtattatatcataatttgttcgatttgcaaaggtccggtttttattcttgtgtttcggccttggctgcgagtttggcttgtttttttcgttctcgaccttggcggaagaaggtctgcatgatggctgcacattctgcttccaagattcctgtttctacttcgactcggtgattgaggcgttcatctgccaaaatgtcgtagagactacctgctccaccgaacttctgattggtcgccccgtaaatcacctggggaatccgagctagaccaatggcaccactacacatgacacagggctcaatcgtgacaaaaagcgtcgtatccagcaggcgccagctattttcacgctgattggcctcctcgatcgccatgatttccgcatgcatgaccgcccgctgcagctcctcacgcgcattatgtccacgcccgataatctgaccatccttgaccaagacacagccaatcggtatttcatcattggcgagggcaatctccgcctccttcagggcttccctcataaacatcgctttttcctctatcgtgtagtccatctcttccttcttccttttagtttctttgttcattataccataggcagcttacgactcacaaaaaaagccgccgattgggcgactcttatgggagattattatgaaaaagtttaggaggtttaaacaaagttaggaggtctttgtttatgcttctagtatagctggcctatcttaaataaagcttaagttctctgagtattgatgattttggaaatatcaccacttagaatctcaaaaatatctgacaaattgctggcttactactatccgctttgtcgcagaaccaactattgtggcatcgctcatcctttacgtaactcaaggatttggtcatagcgctcttcttcatcaatatgatgggctatttctagtaccgtgatcggcaaagaaaagattaggtctctaaccagacgactatttttttcgtccaaagctgatgtcacttcgtccgctaataaaatatccttctcgcgtaagagaaaacgagccaactctaatctgacacgctgacctcctgaaatgttttcaccattattatgaatttctacattcaaaatatcctgaaattcatctattaagccaactcggtccaatacctccaataattcatggtcctgaaaaggctgaccaaaagttagattatagcggatagtatcgttaaacaggaagggatgctggctaattaaaccgatattcccttggaaatgactcgttatttgatttccatcatactgaacgaaaatgtcaccctcatcacatacttcttctcctaaaatcaagcgaaaaagagtcgtctttccagacccgctcggtcctttgattaagaccttctgacctactgaaatcgtcgccgtcaaatcagaaaaaagctgacgttcagcaaaactttttgaaatatgatttaagcgcaacgattcgagattttcaacaaattgatcctttgtctcttcgaaatcaggttcttcctcgataatcttaaacaggcggttcgcagtcggcaaggcaccttggagattggctgcactgtacatcagagtttggatcggttctaccagcatccccgcagcaacatacatagagatgaggcttgtaatagaaatagaatttccctgtaaactcaaataaaagcctaaagcaagaggaacaacctgactaaaaaagaccataaatccattaaagaaaaaaataatattatgtgtgaaacaaaatctttggatggctttttgatattctccgtttaaatcattcacgcgctcttcattcagcctcatggcctgattaatccgtaaggtttggctgccttgcatactatccgagacaagcccatgtaatttcgttctaagcttggaccagctgtctcccgaatcttgtaaacgacgattcatgatgaactgaggaataggtctcataatcgtaaaaatgacaaaaataagtcctaagagaaaattttgtgaaacaatataaatggctgtaacaagggcgacaaatccccaactcaccataacatttatattttccaaataattatcgcccacatattccatatcttgagttagcagactaactttttcatcattggaaaatttaggattcaatatgactttcttaaataaaagggcacggacacttttgttgatttctcttcggaatatattgtgcgaatagtttgaaaacagcatcagactataaataacaagatagacagacaaaccaaataaaacaaaattgagaatttttccataagaaaggccgtcttgatctaacttcaaggccttcgttaaaatcagaggttgcgccaacaccaaaccactattcacaatacgccctaaaaaaataggaaaaagatacttcttatcaatgtacttataaatatttctcataattatcatccatcaaaatagagggctagcacaaccctcttctctaatttatttaaaatcgtgattatttacaatcacaattatagttaaatactctaggtttagcattcattttgtcatcgaatttgttattcactttaaccttcaccgaaaattacaatctccatgtgtcaaaattgttagttccaataattcagcatctgtatcgcttattttagatagatacttttcgacctcatactcaccctcacttaaatatttatttttatcaagataagcatgaaactctttcctaatcacatcattgctgtcgactactctattcaattcattcgtaagaaaaaatgaatgattggttttagtattaaaatacaacgtaccatcatcagtactatattttaatatatatcgtgacaaattcatattatcacctcttaatctgtgtgacttaacctacagtaagtatacaccgatagaaatattaaataaagcaatattcagcagattagaaaagttccaacttttaatattttggaaaaggttatcctataaaagctgcaatttcgccaacttcttgagcaatataggtggcgccggcttcttccaattcttccctgcttccaaagccataaaggacaccgatagaatcaaacttttgcgcttgagcgccaagcacatcgtgctccctgtctccaatcatgatggtatgcgccaaatctgtaatcccattttgctccaaggcatactggataacatcgctttttttactacgttttctatccatggtcgcaccagcgacaaagtcaaaataatcatacaaaccaaagtgtttgagaatttgaatggaaaattcttcaggctttgacgtagctacaatcaactgtttgccagcctgcttgagagaagccagcaagtcaggaacgcctagatagacctcattttcataaaggcctttttcggaaaaatactcatgatagtagtcaatggcctttaaacattcttccttagaaaatccataaaagcgctcaaaagactcctgcaagggcggaccgatgaaaactctcaatgctttcttgtctggcacttgaatcccatattttcctaaggcataggccaccgagttggtaatccctagttctgaattggtcaaggtgccgtctaggtcaaataaaatcgtttgatacattttttcctctttctgctttcaaaaagaggctgggacaaaagtcctagcctctcaattgtctttggattgtcgagcaagacgcagtggttgagtgggctctactacgctgatttcatcagcttttacagccctactcaactgtgcggaggtgggacgatgaaatcgaattctaacgaatgaccgatttctgtcccactctcttatcttcatttgcttataaactagaccacacactttcaaggatattggtttggtcacgatctggtccgactgagaaggttgaaatgcgcacaccaactaattcaccgacacggcggacatagttgcgggcattttctggaagctcatccaagtggcggacacctgtgatgtcttctgaccagcctggtaattcttcatagattggtttgcaacgtttgagttgctccaagcttgctgggtagtggtcgatgcgttccccatccaagtcgtaggctacacagattttcactgtatccaagccggacagaacgtcgatcgagttcaagctaaggttggtaattcctgacacgcggcggctatggcgcatgacaactgagtcaaaccaaccaacacgacgaggacgaccggttgttgtcccatactcatgccccacttcacggatccggtcccccacttcatcaaagagttctgtagggaatggtccgtcaccgacacggctggtataggctttacatacaccgacaaccttgtcgatcttgcttgggccgacacctgatccgatggtcaccccaccagcaactgggtttgatgaagtaacaaatggataagttccttggtcgatatccaacataaccccttgggctccttcaaagagcacgcgcttgccgttatccaaagcatcgttcaagatgacagaagtatcggttacatattgtttgatttgttgaccatattcatagtattcttcgaagatatcgtcaaaggaaagagcctctgcttcatagagtttggtaaattgacggttcttttcttccaagttgatgcgcaggcgttctgcaaagacgtcgcggtccaaaagatccgcgatccggattcccacacgcgcagccttgtccatgtaagctggtccaatccctttgatggtcgttccgattttgttgtccccttttgactcttcttggagacggtccaattcgatatggtaagggaggatgacatgggcgcggtctgaaatgcgcaaactgtctgttgtcacaccttcttcatgaagataagccaactctttgaccaatgatttaggattgatcacaaccccattcccaatgacagaaatcttttcagggaagaagatacctgaaggaatcaagtgcaacttgaattttttgccgtcgatcacgatggtgtgaccggcattgtccccaccttggtagcgagcaatgacttctgcattggctgataggaagtctgtaatcttcccttttccttcatctccccactgggttcctacaacaactactgatgtcatatctttgtctgagctatatagctcgtcctttcttgaaaagcaggcaggaatctcacctgcgattatgttttatacctcattatatgaaaaatttgacaatttttcaaggagggttcatcatttcatttgttttttctcttatgtagacgaattacatttttacaaaatatgtattttctgaattttagtacttaatttaaaataaaagttcggaatttttgtaaaatcgtagcggaaatttgctttctttttccgtttgtaatagactaaaataactaccataggacggtgaaacgatgacgattaatcaattactgcagaaactggatacatcaagccctattctccaagcgacctttggtctggagagggaaaatctgcgagtgacaactgatggacacttagctcaaactgctcatccgagtcagcttggttcccgcaatttccacccgaccatccaaacagacttcagcgaacaacaactggaactaattacacctattgctcactctactaaggaagcgcggcgcttactgggagctatcagcgatgtggcaggccgctcaattgaccagagtgaatgcctgtggcctctgtccatgccaccgcagctgactgaagaagatattatcatcgcccgtctggaaaacgaatacgaacgccactaccgagagggtttagcgaaaaaatatggcaaaaaactacaggccatctctggtatccactacaacatggagctagggaaagatctggtcgctgctctctttcaagtcagctcctatcatttactcaaggactttaaaaatgacctctatctcaaactggctcgaaactttctgcgtttccgatggctcttaacctatctctacggtgctgctcctctggcagaagccggcttctacagtcaggaatacccgcagcctatccgctcttttcgcaacagcaactatggctatgtcaatgacgagaatattcaggtgtcctacacttctttggagcaatatgtaaccgatattgacaactacgttcagtctggcgagctcagtgctgaaaaagaattttactcagccgttcgcttccgtggacagaagcacaatcgcgcctatctggagcagggtatcacctatctggaattccgctgcttcgatctcaatccttttgaccatttgggcattagccaagagaccttagatactgtccatctctttttactgggcctgctctggctagatgatgtagaaaatgttgatgcagtattaaaagatgctcatgatttgaaccagaaaattgcttgtagccacccgctgactgccctgccagatgaggcagacagctcagccattctccaagccatggaagggctcatccagcattttgaactgccaacttactatcaaactttgctggaccagatgagagaggctctcttacatcctcagctgacactgtcaggacagctcctgccccatatccagcaagattccttaacagcttttggtctagaaaaagcagaagaataccaccgctatgcctggactgctccttatgccctcaaaggctacgaaaatatggaactgtccacccagatgctactctttgatgctattcaaaaggggctaaatgtcgaaattttagatgaaaaggaccaatttctcaagctttggcatggtagtcatgtagaatatgttaagaacggcaatatgacctccaaggataactatgtcatccctttggccatggccaataaaacagtcaccaaaaagattttggcagcagctgactttcccgttccggctggagcagaattttcttctctagaagagggactggcctactaccctttgattaagaaccgagaaattgttgtcaaacccaagtcaactaacttcggactgggcatctctatcttccaagagccagctagcctggaagcttatcacaaggctctggagattgctttttcagaagatgtcgccgtcttagtggaggaatttatcgctggaacggagtaccgcttctttgtcttagacggacaatgccaagcagtcctcttgcgagtggcggccaatgtcgtcggagacggtcagcataccgtgagagaattgattaccatcaaaaatgacaatcctctgcggggccgagatcatcgttcaccgcttgaaatcattgaactgggggacattgaactgctcatgctggaccagcaaggctatggaccagatgatatcctgcctgctggagtcaaggttgacttgcggcgcaattccaacatttctactggcggagactcgattgatgtcacagacagcatgcacccatcttataaggaactcgctgcggacatggcaaaggctatgggagcctgggcctgtggcgttgatctcatcatccctgacagctctgctatttccacaaaggaaaatcccaactgtacctgcatcgagctcaacttcaatccttctatgtatatgcacacctattgtgctgaggggccgggacaaagcattactccgaaaatactagctaaacttttcccagaaatggacctataaagtaagaaaacgcagaagatgtctctgcgtttttgttttgtaaccgaggtagagttttagatgataacctaaaaagattaagcatggtcctcctacaagtttaaaatagcaagtcatttgctgtaaaatcatcctctaacaagcaaatttcaaacctctcctgcatatagcagaggaaatcttccctttttcccaaaaagaatcataggccgcgaatacaaggctagtatcatctgaacaagttccagccagttactgttggcttccatagcccaccatctcaatcgctttaaaactgcctcgggttaaaaattcatacggaacccctaatgcatcagctaccgccaaaccatagactgccgctttcaaagattggttaatgctagcctcctttgttttattatactatttttggtcttaaaattcttcctaaccccaaaaaacaagcgcaggcctgcgcctgtttttctattttgtgttaaaataaaaggtatggacaaaattatcaaaactatctcagaaagcggcgcttttcgtgcctatgtactagacagtacagaaaccgtacgaacagcccaagaaaaacatcatacacaagctagctccacggtcgcacttggccgtaccctgatcgctagtcaaattctcgcagccaatgaaaagggaaacaccaagataacagtgaaaatcctgggcactagctcacttggtgctatcatcactgtggcagatactcaaggaaacgtcaaaggctacgtgcaaaatcctggtgtggatatcaagaaaacagcgaccggtgaagtcgtggtcggaccatttgtcggaaacggggaattcctagtgattaccgactacggcacaggcaatccttatcattccatgacacctctcgtcactggagaaatcggtgaagacctagcttattacttgactgaaagccaacaaacgccatctgcggttgggctcaatgtcctccttgatgaagaagacaaggtcaaggttgccggtggtttcttggtgcaggtcttgccaaatgccaaggaagaagaaattgccagctttgaaaaacggatccaagaaatgccggccatttctacccttttagcctctgacgaccatattgaagcccttcttactgccatctatggtgacgaaccatacaagcgtctctcagaagaagagatccgcttccagtgtgactgtagcaaggaacgcttcatgaatgccttggcaagcttaccagccaaagaccttcaagaaatgaaggacgaagaccatggcgcggaaatcgcttgccaattctgtcagacaacttaccactttgatgaaaacgacttggaggaactcattcgtgacaaatcttaatacaccttttatgattgggaacgtcgagatcccaaaccggacggtcctagcccccatggccggagtgaccaactcagccttccggaccattgcgaaagaactgggggcggggctcgttgtgatggaaatggtctctgacaaggggatccagtacaacaatgaaaaaactctgcatatgctccatatcgatgagggagaaaatcctgtatcgatccagctctttgggagcgacgaagatagcttagcacgcgcagcagaatttatccaagaaaataccaaaactgatatcgtggatatcaacatgggctgcccggtaaataaaatcgtcaagaacgaggcgggtgctatgtggcttaaagatcccgataagatctactctatcattaacaaggttcaatccgtccttgatatccctctcactgttaaaatgcggacaggttggtctgacccttctctagcagttgagaatgccctcgctgccgaagctgcaggtgtctctgcccttgccatgcatggacggactcgggagcaaatgtatacaggtcatgcggatcttgagacccttcacaaggttgcacaagctctgaccaagattccatttatcgcaaacggagatatccgtacggttcaagatgccaaacaacggatcgaagaagtcggtgccgatgcggtcatgattggtcgcgctgctatgggcaatccttatctcttcaaccaaatcaaccactactttgaaacaggagaaatcctgcctgatttgacttttgaagacaaaatgaagattgcttacgaacacttgaaacgcttgatcgatctcaaaggtgagcacattgccgttcgtgaattccgtggtctcgcccctcactacctccgtggtacctcaggtgcagccaaactccgtggcgccatctcccaagctagcactctggctgagattgaagaactcttacaattaaaagcatagaaacgcaaaaagcagagagtgggacagaaatcggtaattcgttagaattcgatttcgtcgtcccacctccgcacagttgagtagggctgtaaaagctgatgaaatcagcgtagtagagcccactcaaccactgcgtcttgctcaacaatccaaaaataattgagaggctaggacttttgtcccagcctctttttatagattatctgtttgcaggccgagttgtttgactctggcggtgtagtaggtcatgatcaaaaagaggttcactgtgatcagccagatggcccatttgtgaataaaatgcatgaggatggctacactaatagctcccgcaacaaagcttccaacgacaatcccgtaattcatagcctgcctgcgatactcgtccaaatctccctttcctcgagtgattcggtacaaggccgtcagcatcttgcgataatttccggaagtcataaagatcacataagggtgattttcgatgaggctccctgtaaaggtcaacatcatcatccctgttccaaaagcaataaagggaacttctacaggtggtatgacagacaccaagggaatcaggagtgttaccacaaacaaaggaatcaacatcttggtccgccaaaaggctgtcttgcgatactctttgatatggagggcaaccaaaaagccgatcgagaaaaatagaatagatgaaaaacgcatgatggtattttcgacacggggatcgtgccaatcagcgatgagaagcaggaggttccccgtttgggtcgcgaccaaactccggtagtgcatgtggcaaaaaacatcgaggccccctccgataaaaccaagcagagcccccatcagtcgtgtattttgtggtaaaattattttttcttccatagtcttgtctcttttgatttcaattatgattattataccactttgcacacaagtggagcaggaaaaatcagaaaaagcccttccgttactaaaagtaagggagggctggtagaatgaaccccgctcgatctactgttttaaacgataggtcttgcgtggttttttcttaggaacccgcttgacacccacttcctccacgaattctccgaattttacgaggaagttattgctaacgatggggcgtccaggattgatcagattgaccaactcggttgcttcataaacggtgaaaggctcctctaacagatagaggaaggttggattccagtctagacgaccctgaatccgcttgatcgattcttgaataatctgatagtggtcaaaggcaaaatcagaagcagctaaggattctccatcgagcaagcactgggactttttgaagtcgacatcgagaaaaacgacttccttggcatcgtcacctgcatgagctaagtctactgcttctgctggcagatagaccagatgggcaatggtaatgacccagcctctggggtcccgcccaggggtggaaactgtcatgagttgttccaccttattcactggaagatcgagcccaacttcttctttgacttctcggatacaggcatgagtcgcatcttcatccttgttcacaaagccccccaccaaggcgaggcggtgttgataagggtgggctttgcggcgaatggctaaaagcttgagcttgccttcaacaaaacagtaggccaccatatcggctgtgacacttggagtttcataagtcggcaggtcttgctccttgtaccacttgagaaagtctgcttcactagcggccgtctcaaaatactctttctccgtcattcctgctggaattgagagacttgccatctaagccacctccttcttgagggctttggtccattctaagaagaagggaacgctggaaataagcaggagatagatccattgaaaggctgtgcgtcctacaaaaaggtccttccacaggagtttcataatattgacaaagccttgttttttcgcttcttggtgaacatttttaaagtcttggataaaggttgtgaatttttcagataggtttttcataagctgctccttagtcggcttggtagatggcatcgatcaccttcttggcttcttcgtagttgccgaggtagtctgatgcgaggaaagtggtcggaatgtttcctaggtattgctggcgcaattggtctaggtaatttgaaaagctggtacggatctcttcgtcagccatggtcatgtctcggaaaccatcattgacataagagccgatcggctgtacaaagaggatcaaatcccatttttctttggagagaatactgacaaagaggttgtcaaaggtatcggtcatgctggtatcctggccttcgacttccatgtagtagtcgtaataacccttggttaccagggaattggtatcggcgatgacaaggcctcgattggcactactatcgatgagcttagaggtttgatcatactgtcctaagagtaggtaatagtaatcttttggcgtgagttcatcatcctgcacattgttcttgatctggtattcacgggcatactcaagactaacaggtgcatcgtaaaagcgagccaagtcctttgcaagggtcgttttcccgttgctggcgctccccatgatcaagacttttttcgtgaactggcgacggaagggctgggcaatgtatttccagtatttgctgggattttcccggatcatggtagcagagatcccgaagcgacgctcttctaagtgaacttcaaaccctctagcttccaactcttccttgtaggctttctcccctacataaaagatcaactcttctgtctctgtttgatactggatggtgtttagggctgtctgtaaccaaggctcccagcccaagggataacgaggaagttctgtctcatctaacttatagacttgggtcaactcatcatttgagaaggcttcacggatataacggaagcgtttttgtaaggtcagtcccacttcttcaccacgatccccttcataaccagatacaatgacacgaacgcgatcacactgacgcttggcccgctggatcaggtcaatatgcccttgatgaagaggcgcaaaggttccaaaaaccagggcaattctttcttttttcatatgaactcctttttataattttttataaatagatttcctttatatttttattataaactatattttctatctgtcagtagttttttataaaaaaatatatttttcttcaaatcaacaaaaaaagatctgaaaagagaagcttatcctttcagatctttcgaattttattcacgagtgagggagtggctaacaccgtctttaagaaccgtcacactagatacagagccatcttttccaactacgatatctagagtcgccgcagacccatcgcctgctgagagattagcatggtaatgaccatcatccaaggtatagttataagcgctgataccataggctacgggttggcccccaggaagttggatggtcacttgaccaccttggccaatagtgactccagtgtcgcgtttgtcagaccaattcccagctgctgcagagaaatcccctgctgccacagaatagactcccttgtattgggcattctccgtcgcagaagcttgcttcttagcctgggcatggccgtcttctagacttggcaattttgctttcgctggtgttgctggagtggctacttcttttgtttcttttgttacgggtgctgctggtgtcgcttctttagctggagcaggtgtttgactagctgctgcttggttatttttgctaccaacagtatgactttcttctgatttgctatcagaggatgaagaggcaatcggatctttactagtgatcacttttttcttagaagaagagctggtttgtttaaccagactggtctttgaactgcttgcttctgaagttttttcttctttattcccgccacaagctcctaggaaaagactagctgtcaaagctagggctgctagggaaatgatttttttgtttttcataacagaacctcttttttgtaacatttgtaatattttgtaacattattgtaacactgttatatgaggctgtcaatagtttctcaaatatttttctaatttgaaagaaattttaggtaagttcctaaactttgcaaaaaaaagccggacatactgtccagcttttcttatttatacacttcttgatagaattcgatcttgtccccttttttaacggtggtttcagcagcaccttttggagccatttcgccattgatcttgtacatccagtaaagaccttttgcttcatcttggctgtgaccgtcaatcgaggtgatcatgccatttttttcttcaatcttgtagttggctttgagcactttcatgaggttgctctcttctgctactttcaaggttttcgattgcgctttttgaccttctggcgtcacgctaatcgtaatcgaaatttcgtttttcttggcaacttctgtgctagaagctgttgtttgatggtttgtgctatgagacgaagcgcaactcgctaaaagaagagctgcaagtaaggtcatcaagctagaaatggtttttttcaacataaaatctcctaaagatttgatagataatgggatagaaaatgatcgtcgacagagcatgggcaaggttaaaactaaaaccattgaccaaagcataggtccaccaaggaatatggtatatcaaggcataaacactatcgatcaagaccccataagcaaaggacagtaggcccacaaaaaggatctgaaggacaaagggcaaccacttgtaactgatgcgccaaatgagcatcaaacagccaaaggcgacaatctgaaagaacacaatcaggctcatccccaggaaaaagacggagacaaacatggtgatcatcatcacaagaaaagcaaagctatacccttcaaatatcaccaagagaaaaaagatggcagaaataggttggacatttgggaaaggggcaaaagcctgacgtagagcgacacaaagggccgccaaaagcgaaatacgggttaatcgctgaagcgtcatgacatcctcctagacaatctcaaacttgatcgttccggctgtcgttccaaccttgatcgtttgtccttcttgggcttggcctttcagcaatagctctgctagttgatcttccacttcggtctgcaagacacgacgcagtgggcgagctcccatttctggatcgtagcctttggttgctagcaacttgagcgctgaaggctggaatttgagggtcataccttgttcggccaaggtcgcgatgagcggtttgaccatgactttcaccacctgctgcatgtcctcgctggataggctatggaataccaccttttcatcaatccggttgataaactctggacgataggtcttcttcaactcttcaaacatgcgtttttccatattagcttgatcaaagcggatatctttggcaccaaagccaactgtcttatcatcccgaagggctgttgctcccaggtttgaggtcatgatgataatggtattggagaagtcaatcttccggcctttactatcggttaagactccgtcatccaagacttgcaaaaggacattgaaaatatctggatgggctttttccacctcatcaaataagaggaccgaatacggtttgttgcggactttctcggtcaactcgcctccttcttcgtagcccacatagcctggaggggcaccgttgaggcggctcgctgcgaatttttccatatactcactcatatcaaaacggatgagggccgattcatcatcaaacagaacttccgccaaagctttggctagctctgtttttccgacaccggtaggtcctaagaacatgaaagaaccgatcggacgcttgttgctacggatccccgattgattgcgtcgaatagcccgactgatactcgaaacggcttggtcttgaccaatcacgcgcttatgcaattctgcttctaagtttaggtacttcttggcatcggtttgggtcagtttttgagttggaataccggataattggctcaaggtcaccaagacatcttggtcagtgacttcttttttgtagacaatgggagcggcctctacttctaagagctgggctgctttcttccacttgccatccatcaaggcccgatccaaggcggtcaactcttcttttacgtgaccgttggaatcgcggttttgtacggtagctgccgcttcatccaagagatcaatggctgaatctggcaattgacgactagtcaaatagcggtgggcatatttgacagctgtttcgatcgcttcatcggtaatggtcacatgatggtggtcctgataagtctctttcaagccttggagaatttggatgctatctgcaacacttggctcttcaatggtgactttcgcaaaacgccgagagagggctgcatctttttcgatatgcttttggtactcatcttgggtcgttgccccaactgtacgcaaggttccccgtgccagggctggttttagaatattggctgcgtctaaggtcgaatcaataccggatcctgaccccataatagtatgcagttcatcgataaagagaatcacgtgaccgtcttcttcgatgtcctggatgatattgttcatccgttcttcgaagtccccacggaagcgcgtcccagcaacgacattcatgagatccaattccagaacacgcatctgcgcgatttcagctggtacattgccactagcgacacgctgggccagacctaaggcaagggctgtttttccgacccctgcttctcccaccaatacaggattgttcttcgtcttgcggctgaggatttggatcatgcgtgaaatctctgcatcccgaccaatcacaggctcaagctggcctgcacgcgccatttctgtcaaatcacgggtataatcttcaagacctccactggtgcttgggggcatgcccatcatatttcccatggtttggcggttagggttttgggcgcgatagagactccgaatggctttgatatcattcttgtcccagcctgccttgtcctcaagattctttcgaagagaggcaataggaactcccttgtcttgctctgtaaaggcaaagccggcaaactccatgacttggctcgctaaggtcccacggtctgctagaagagagaggagcacatgctctgttcccaaggtcttggcatgaaggacctgggcaatctctcttgcgtgcttcataatggcttccatccgataagaaaatgggaagatttcataccgattgtcgctttgaaaagcttggcctgtaatatgctccgccgcatcctgaaactcatcgatctgcataggataatcgttcagtacagaacctgccacgctatagggattattggccatagccgtcaggagatgccaagtatctaaggtatgcccctgatagtggcctgctagtatttgggccgcttctatactttctaacagtgctgttgaatagttcatctagtcggtatttccttttctatctacttgttgaatgatttttttcagcatcgttgctcgtaggatgagagcatctcgacctaggacctcatcggaggtcgtcgcaagcaagagctgagcctcacgttttgtcaataatttttcttcatagagcatctggaggatatcattgaagacctgctggctgatggtctctccaatattggctgccaagtcttggagcatctgatggtgatctgaaaactggaccttgccaatgcggatatagcccccaccaccgcgcttgctctctacaatatagcctcggctctcggtaaagcgggtcttaatgacatagttaatctgactgggtacgacctgaaagacatcggctaactcacttcttttgagctctgccatgccagcttgagccagcaaggccttgatataagcttcaatgctatcagatgtgttcttatttgccatgatgctcctttctggcttgtttttttctagatggatgctctgctctttggcccataaaaaatggccttggagtgttccttctcatcattgaccttatttgactattatacaatttttacggctgtaaataaagcaaagactctatggaaataggaatctcttaaggaaaggagaaaaacaaaagagagtgggacagaaatcggtaattcgttagaattcgatttcgtcgtcccacctccgcacagttgagtagggctgtaaaagctgatgaaatcagcgtagtagagcccactcaaccactgcgtcttgctcgacaatccaaaaataattgagaggctaggacttttgtcccagcctcttatgcgaataaggagctactctttgcgacgagcaaatttcgcgcctccgcccaagaatcctagaccaagaaggcctaaccaagcaaacaatccactttcttttgtaccggtttgaggaagttttccttccgattgtagagaaggacttttaaccacttctttttccggatggtctgaagtcgaaacagaaactgcttctggagttttcggttgcaagagaacatgtcttcctttttcttttttgtcttcagcttgagaaagagttgcaacttctggttgcaccttacttggagttacaggagtggttggagtcggcatatcagctatcaacggactttcttccgcttccttcgtcccgacttctgtgatctggtcctgggcctccacttcgacaaaggcatcgacttctgtccgaatttctttgccttcttcttgtcgaacctcgatcaatttcaatcggcgtccgaccttccctgcttgaaggatccggctttcgcccttggccaagtccttgttctcacgtgtttgactctcaaatggaatctcctccgcttcgatgagaagttctggtttttcaagaatcaaatcccgaacaccttcgtctgggcgtgtctgcgtcagcggttcataattgcgagcatcttctaagatggtttcaagggcttcgacttgattggctgcagcaaccaaatctgggcgctcttgatccaacaactgagtcaagtccgtcaattgtccttgaaccgtcggtttgaggtctgctttcaagcgctcgagagaagtagccttgatcttttctactccttctctgatgatctgttgcaactcttcttgactgagtagctgactatctttccctgagaggacaaatcggtctacctggatagctctggacgactgaggatcattgagggctggatccagatgcaggcgtagctgatggtagccttttgctagaccttgcagattgaccaaactctggtcgagcttgcgttggtctccgtagccactgaaataatgatcgccttcgatctcataatcatggccccgaccttcttcgaaggctatttcttttccatccagggtgacgctgtaaagaccatgacttgggtcgactactcctcgaacctccacacccgtgcccttaaaggtaatggtcacttcaatgtgtttcttgccttcttcatcgatcacttggttaaagctcgaccaggattctgttccatttgagaagtttggattgtctgtctcgtggtgccaaccctcactgtaatgcagtttcggatcttggtcatctacttctttgcgattttctggcaactggtcctcgttcattacttggactgtcagttctggaataaagccgaccagacttccttgatccggatggagcaatttgaccttaaagtcatagacgtcggtcgcttttcctgcaaaatcaagggttggaacttggactgttttttctgtttcgccatctgcaaactcaagagtgacattggtatctttgtagaccttaccatgaacccctgttcccggttctgtgattaatttaagactagcacttcctttagagccaccttttctcttgacgacgacttgcgctgggtcgcctttcttaatggctagggttggctgagcaaattcaaagagccccttttcttggttactgagggcataaatcccttccgttgcgatcgcatctcccttgctattgaccaaggtcaaggtgtgggatcctgctgccaagtccggtgtttcatagaccttttggctgcgtttgcggctcgggctttgggtattgagcgtcgctagcttttggccatcgacatagacatccatttccccatgaccaggatccacggttgcgacgacataggccttagtgccttcaaactgataggtcaccgaagctcctttttccttggtccacatagaggtgcctcgaacaccttctccctcttcattccactgaccattggcccggtcagcagtccggtcagaatgataagtcaaaccaagcggatagccatcggtttcttcaatgctagctggcgtcttatagacagagactccgttcaagattggagtagcttgggcatcagtgatggccacccggatatagcgactatcaactggttgccctttgatcaaacgtcgataacctacggttgagccagccccaaaaggaacccattggccattcactgccacatcaatagtaaaaccggaaatccgttggcctttctcaatcgtttctttgagctctaccacatcaaaatgctgttcttttccaagatcaaggacaaaagatccggtcttggcatcatcagccggtgcccaactggtcttttcatcgccatctgtcaaatggctggccttgtagagcggattgcgtcgtgtcgagtcagcttcgaccaaagctcctgccgcatagttcacactgtagagttggtccaaggtctgacggaattctttcaaacgggccacatcggcctccgcaaatttcccatcttgattgggtggaatattaagcagaagcggagttccacggccgaccgatttgaagtaaatgtccatcaattcgcgcaaggacttaggctcttgattgtcatggtagaaccagccggagcgaatagagacatcggcttctcccactgagtattgcttcccttccggatccccgtgattgaggtagctattagatggattgttgcggatcttatctggattgaccttttgccaaaccggatctccggcaatccccttttcatttccaatccaacgaacattggtcggctcagctgagaagatggcaatatccccttgggccttgcgaatggcttcaaaccacttgtcaaaggtataggtgaccttttgagccccatcgccacgcgctccatccatccagacttctacgaacttacccttgttcccatattttggatcttcaaggatttccttaagctggttgaggtagtattcgttgtattggtcctctgtatccacatggtagagcgggctgtgagcgtcccaaggtgagagatagacccccatgtccatgtcatacttgctggcagaagcagaaacctcggctaggacatcgcctttcccatctttccaaccacttttggcaatggtatggtcggtgtatttggaagggtacaagaggaagccatcgtggtgcttgacgaccatgatcgtccgtttaaagcctgcatctttcagggttttgatccactgatcggtatccagatgctctggatagaaataataaggatcttcttgcccatctccccactcacgatcgtagtaggtattcatcccaaagtggatgaaagctgctagctcttcgtggtggtattgcatctgagccttgcttggaagtggtccatagtctgcaatctcagtctcctcatctagagaagtggctggttgagtggcttctgtcccttggctggctgtgcgattttctttctcgctagtagctactgaggcatgctctgattcttcttggtgctcgttcacagttttctcctcctttccttgatctcctgcattgcttgtttcaacccgtccttcacgtggttcactattcttagcttgttcctctgcgtaactggtagtagctcctaaaaaacaagtcgctacgactaccgagcagacgcctactgagagtttacgaatgccaaatcgatttctctgatcaactaatctttttcccatattctattcctttatgtcaccaggtaaagagggtggggcttccccatcctccttctttttacctgtgaacttttcaccgttttttgctagtttctctagctgttttatttggcctttttggctctttttttctgatcgtccagcacagcactagcaaggcctgccgctaggattccagcaacgaggcttgcgacgctttcttccgttcctgtatttggtaatctaccttcggaaactggagcagctgaaactgctggtgtttgagtttctttctcgacttccttcactactgcatctattccttcctggcgcaccgctttgacctcaagagatgcttgaggagttgcgatagctactggtccttctgaaacatgagggcgctctgggttcggaagcggttgtggttgtggctgtggctctggctgcggttgtggttctggttgtggagtgtctggaagcacttctttcgtgcccacctctgtgatttctgccactggatctagctctacaaaggcatccagttccttccggctttctacaccatttccttgagagacttccaccaagcgcaatttgcggcctttttgaccttcttgaaccacacgtttctcaccttttggaagatccgcatttggacgttctaagcgttcaaagtccatctcttctggctcaatcaccaactctggtttggtatggaccagattcttaaccccttcttcaggaatggctgaacctgtaggtgcttttgcggagagagaaagttgatatactttttcgagcttgccatcttctgagacaaccttgacaagaacaggggcattagcacttttagcatccacgaccgtaacggctgttccattcttgccttgtgctgaaacgattggacggtctccttcatactctagatgataatctgtcacatctggtttaaagccttctaggtctttgccattcacttggatggtgacatcagttgttgcctgagcctcttctgttggggcataggcgctcaattcaatgattccgattccttttagatgttcatcacggaccattcttaaacggatggctttagttctggtttcgttgaagctgaggttagagatatagccagcttcaaagtcataatctaagctataaggaatttcttcccagttagaggcttggttaaatggatgatctggaagattcttcagattgccataatcatccggaacctcaaagtctggaccaatatagcgttcaagaacggttttcgttggtaggcctgtttcctgatctgcaaagaagtcgaccgctactttattgaccaaacgctctgttacttgaccatttttcttgaagatgagaccagcaaaggcttcggtttgttctggttctctcttccagttggtccaacgatagtattcgttgtagccaccatcgttgatgtaatcgatatagtcgatttgatttggatcgagatcattggtttcactggcaaatgccctggtatcctctgcattgtagtcacggttcacagaaaggttctctcctgtcttttctgacacccggacagtcagctgagctgtcagatcataaccgaggacctttccttctaacgtgaagctaccttcgtgagaaagcgcatcagctgggatagcctgccagtccaccgtaagttccttgcgttcatagcctgtgtccccttggaagtaaacgcctacggtagatggtagaaccagatcttgaccgactttcacaaaacggctacctgcttccactgctactgggacagcttgtttcaatttttctgcatcgcttgtgagatggaggcggtattcttgtaagatggtgccgtcttctgctttatggatgacacggattggctccccttcatggacacttggcacaaccgttgcaagaccgtgatggctggctgtcgcttccacttgtggataagcccgatcacgcgcatcgatgtagtaatcggtcacacttggattaacacctggtaaaacctcaccgttgacacgaatggtcacctggctcttttcttctgccgcaaccttattggcaaatacctgaatctctgaaatagagcttccacgtttgccttctggtgtcttcatgcggatccgaacggcataggtgtcgactttatcaaaactgaaatgattcatcttgccagctgctaccggttcttcaacggttaggttgctgacttctttccagttagctggattgttaaatggatggtctgtttcgtctttaacacgatttggattgcttggaactgttgggatttgttcccctgtatagtactcaatcacatattcacttggagctccaacgccgtggtcttcgtggaaacctacatggaggttgtccactgctcgcttagtcaagataccagaatccccaaacaagatcccaaccgaatcttccgcattatcacggccccagttggtccaacggttagctggagcatcggtaaaggagatgaccttatcattgaccttagcaactggatccgcatcgttagaatcacttgcaaaagcgagtggcaagacagagcctgtccattgctctgctacgttggcccccttgactgtgtttgcggaaacacgaatatgaagacgcgttgaaagatcggttccttctacacgaccagagaggataacttctccttctttggccaagagttgcggatcgaccgcatcccaggccaccttggcagtataggtcttgccattagagtgataggtccgtacgctttctggaagagctggtttttcgccgactggagtggtagtgctgacttcttctacagcgataatgccttcaaccgtcacttgagcttgggcttctttctccacaccctctacatgaccggtgactgtaaagctatggtaatccctaacctgatccgctgttacagcatcccaggtcacgtgtttttctttagggaatcccttgtcatactcaaccaagacggtttctggaagagctggcaacatgtttcgatcggtactgattcgtacaggacgcaccttgacaaccgtcttttcttctggatttggcgtgatggtaaagctgacttctcctgtttgtccttggaagttggcttctaaatgaaccagccctgcttcccgcaattccaaacctttcttagtcgtaactgcttttccttgactaccagctcttgtcttcacatcgatttgatctgctttcagactcgctagactaccatcttggtaatgggcaatgacttcaagtggtaccgtttggtcttccttgagttcttgcccttctggcagacgcaattctaggcgctcgatctgtggactttcttcttggaattgtaccacataggtctgtacagctcccgtatccttagcagtcacaaagatttgagccttcaaaccattttcacgattagcttgtaggaccgtcacttgggcattttctgcacttgctatgacttgacctggctcttgaccataagcgagggaacggaaaatagtatggttgccactaccaaattttggaagagctactccatctagctgaaccgttggtttcttagccttggctacatctcctcctgcaaccactagtgtcgcttggaccgtttccccattgcctaggagtcctgtcgctttcaagcgtgctcctggtgtggacaactgatcttcttgaccagcttccaaggtccattgatcgacctcatagtgggcagtggtcccatcggtgaagactaattgcacagccttatccaccgtcgctagatttgctccctgtgggatttgtttgatgactggaaggacttgttccacgccgatcacatcgaccagagcttcgaccgtgcgtccttgaacatgacctgtcacacggacttggccagcacggctatagtctgccgcatcccattcaacggcttcttcttgggctttgccatcgctatagaccacattgaccttacttggcaaggttggttcttctcctagataagcactttgtcgaacaggttccacacctaatacagtgcgttctgcttgatccttcttacctgtaaagaggctgacttggtctgattgcaagcgatctgagtctgcatacagagtaaaggctcccgcctgctccgttgatttgacaatcacaacccctttgccattgaaggctttgcgttgccatgagccatcttcctgcgctttgtagcgttcacggctggcttgttccccattatcgacaccgacaatttggccttgtccatgcaaatggaaatgcaccaaattattggcagttggtacaacacgaccttcttcatcgacgatttcataggtaatataggtcaaatccttaccgtccgctgcgatcgcgtgttcttctttcaacaaacgaacacccgcagccttgccggctgtttcgacttgatctttcgcgatcacttctcctgcttcgttgcgcgcaatagcttccactttacctggtacataagggaccaaccactctagatagagttcatccggatttgccccttcttggtaagtccggccatcagttgtggtcttcttggtaaaggtcttcactccttgtgattccccattgacaatcaattccacactgtgggcattggagaaggtccgaacaggaatcctcccttcttcatccatgacacgattggctaattctggattgtcccagttccaatgtggcaagagatggaccatcggatgtttctcagccgatacccattgactttggtaaagataaaaatcattctttggaaggccggcagtatcgacaataccgaaataagaacttttcacaggtgtgtcattttggttgtgccatggggttggctcaccgatatagtcggtaccggtccagataaattgtcctgcatagccggcatgatcacggtcaaaggtccaagaggctgtcgctgtccgaccccaaccaacccggtcattgccgtagtctgattgttcatagtggcggtcttcttggttgcttcctacccattctctttcaggatggtagtaagagccccgtgtccgcgtcgcagaagaggtttcagaaccataaatgagccagtttggatgtttcgcccgtaagctttcatagttggcttctgaatagttgaagccaaccgcatcgagctctgctgctaccttttcatggtctcctgagccatcgccaaagcggaatttatcagctcccatggtgacatagcgggttgcatccacttccttgatggtcttgaccaaccgacgaacagttgcgacagatttgtctgaaccatctgcttcaccgacttcgttaccgatcgaccacatcacaatggctggattgttcttgccccgctctaccatggtccgtagatcgtaatcggaccaagtatcccctttccgagcttctgggtgagtggcatccttttcaaagaaacgaccgtaatcgtattgtttcttgccaccataccaggtatcaaaagcttcttcttggaccatcaagcccaactcagcagcaatttttaaggtttgttcactcgctgggttgtgagtcgtccggatcgcattgacccccatgtccttcatctgtttgagacgacggtattcagccttgtaattttcctcagctccaagagccccgtggtcatggtgaagagataccccgtggaatttcgtcgccaccccattgaggaagaagccaccttctggcgtccagttgagatagcgataaccaaagcgttccttttgaacatctactaactgcgaatcccgataaacccgcgtatacaaggtatagagagctggatgatccgttttcacatcccagagggttggtttttcaacatggagggtttgagataggttgatctcttgacctgctagaacagcttgtgcttcactgcgcgttttttcgctcaccacttggccattttgatcgacaatttcatattctgcataaatactatgggcttgatcatcctggttaacaatgcgactcttcaccactgtatctactgccccattttgctgtttttccaactgaggggtcgtaatcgtagtcccatactgcgctaaatgaaccttgtccgttacactcagcttaacatcccggtaaatcccactacctgaataccaacggctacttggttgttgattgaccacatgaaccgcaatggtattctcgcttccatccgcattcaaataaggggtaatatcataagaaaaggcattgtagccatttggataatgaccgacgaattgtccgtttacatagactttggaatccatataaaccccgccaaattccaagcggaccttcttatctagatctttgtcgtccaaacggaaggtcttacgataccaagcatcccctccgtttaattgccccccttcattttgagcaggagagttgtgatcgaaatcaaagaaaatagaccagtcatgaggaagatctaattttttccaatccttgacatccacttgacgcccttctgcaccaggagctacatttaatttaaaataccaatctttattaaaatcacgttctcgatcttgcacaatatcctccgctacacgattttgatctggagcagctatttcttccgttcctgtagcacgctcagatgaagtagaaacgggctggccctcgccttgaggcgctggcttttcctcagctctggtaggggtgatgacagctggagcttctgaaacccttgcaacagcttcaggaacttccgtttctgagttttccgtcacaacacttggtgtctcaatcgaagtcggttcactttcgagggctggcttttcttccgcatggacccttgaaagaccaaaggcagaaatcccaatcacaacagaacaagctccaactgagagcttacgaatactaaaaacaggacgcttttcaaaaaaagactttcccataaaaacctcctcttaggattaaaactcttatttgtaagcgctttcttatgatcgtagacgcttcccaaaatcacatattaactataccaaaaaaagaggaccgataggtcccaatttcgctccaactatagttagattaagaactcctttaattagtggaaatctccgtaacccaaaaaagaggctgggacaaaagtcctagcctctcaattatttttggattgtcgagcaagacgcagtggttgagtgggctctactacgctgatttcatcagcttttacagccctactcaactgtgcggaggtgggacgacgaaatcgaattctaacgaattaccgatttctgtcccactctcttttatcgtttctcttataatcctggttcttgaccaagttcagcagccaccatccaaatgttcttttcaagttctgctttagccccaacaaagatatcgttagttacatcgtcgccttcagcgtcggtaacatccaaagctttttggtaaaggccatcaaggtaatggaagatttcaagaacacgtgtcaagctttcttctacatttttcgtaaatgttccacggcgttcttcaatattgctgtgttccaaaaattcagtcatgctagaataaggagctccaccaagagtgatcaagcgttcgctcacttcatccaaggttgcatccaagctgtccatgtattcgtccatttttggatgccaaaccataaagccacgtccacgcatataccagtgtacttggtgaagggcaatgtgagcgacgtagagatctgctacgacttggttcaagagggcttttgtttctggaagagtttctttattagaaggtgcaaaagttgctacatcagtagctgcttcatgtttcatagttgtcatatcgtttctcctttttataatgattctaattaactatatctttattatatgcttcctctaccagaaagtcaagataaaagatttaaaaagatcattccaaagctggaattgttgccaattgaaagaagatacgatagaatgaagaagactaatcgaaaggcttgaccaatgaaatatatctttaccttcctaatctccatggttccccttgttgaattgcgcggggccatcccttttgccattgcaaatggtattcccttatggatagcgctcctaatcggagtgatcggaaatcttctccctgtccctctgatcttcttcttcgcccgccatatcctcacttggggcgcaaaaaaaccgatcatcggagccttttttagctggtgtctcaataaagggcatagaggcggacagaaattagaaaaagctgcaggagacaagggaatcttttgggccttattgctctttgtggggattcctcttccgggaactggtgcctggactggtgcccttgcagcttctatccttgactgggacttcaaacgcagtagcctcgcagtcatgctgggagtgatcctagccggcctcatcatgggaaccctgtccctgctcttaggaatcgatacctttgcacattaagcaaatgaatgagcccatgatatcaattcacataatattttctctgaatctttccttaggtgagtacggacgtcagcgaacttctatgaagttccatgactaatcaagatacaaagggcgtctgcggataaagtcaaaataggaagtttaacgaagaatctttatattttaggaaaacttatctttttgacacaatccgcagcccgtgttcaattagttttgaacctaaagtttcaagcacttttctcacggcggaaagtttcagaaaatatttggatgaatctccggtaacgtctgttatttttgaaaacaaagtttgtttaatattataaaacagcttaaacaatgatataagatattttccacacaaaaaagaggttcccttcgaaacctcttatttttttattcttagttattaagagctgctgccattgtagctgcaacttctgcttcaaagtcatttgaagctttttcaataccttcaccaacttcaaaacgaacgaattcgataactgaagcatttactgattcaaggtaagcttccactgtcttgctgtcatccatgatgtagacttgtgcaagaagagtgtaggcttggtcaacttttgtgttgtccaagaagaagcgatccattttacctgggatgattttatcccaaattttttctggtttaccttcagctaccaattcagctttgatatcttcttcagcttgagcaaccacttcgtcagtcaattgtgcttttgaaccgaatttcaagtgtggaagagctggtttaccaaccattgcacggctttcgttatcttggtcgataacgtgattcaattgtgccaattcatctttcacgaattgttcatccaattctttgtatgaaagaacagttggtttcattgcagcgatgtgcattgagatttgtttagcaagtgcttcatctccaccttcgatcacagagataacaccgatacgtccaccgttgtgttggtaagcaccgaagtgttgtgcatctgttttttcaagcaaagcaaaacgacggaatgaaattttttcaccgattgtagctgttgcagatacgtatgcagcttcaagagtttcacctgaaggcattgtcaaagcaagagcttcttcgttgttagctggtttcccttcagcgatgacttttgcagtttcgtttaccaattcaacgaattgagcgtttttagcaacaaagtctgtttcagcattcacttcaacaactgctgcaacgtttccatcaacataaacaccagtcaaaccttcagcggcaacacggtcagctttcttagctgctttagccatacctttttcgcgaagcaattcgatcgctttttcgatatcaccttcaacttcaaccaatgcttttttagcgtccatgacaccagcaccagatttttcgcgcaattcttttacaagcttagctgtaatttctgccatttttattctcctatatttttttaataaaataagagggtcgggctgagccctgccctcttaggttcgttacgtataaactagaattaagcgttgtcgccttctacaacttcaacgatttcttcgattgaatcagcttgaccttcagtagctgccaattcagcttctactgtagcaacactgtcttcaccttgacgtccttcgataacagcatcagccattttcgcagtgatcaatttaacagcgcggatagcgtcatcgttcgctgggatgataacatcgatatcatctgggtcagtgtttgtgtcgaccatcgctacaactgggatacccaatttcttagcttctttaacagcgatttgttctttatgtggatccacaacgtacattacgtctgggatacgaggcatgtcttcgataccgcccaagaatttttcaagacgagcgcgttgtttgttcaacaatgcaacttctttcttaggaagaacttcaaaagttccatcttcttccatgcgtttgatttctttcaaacgagcgatacgtttttggattgttccccagttagtaagagttccacccaaccaacggtggttgatgaagtattgacctgaacgaacagcttcttctgcaacagcatcagcagcttgtttcttagtacctacgaacaagataactgcatcgtttgcagctgcatcacgcatgaagtcgtatgcttggtctgcatattttacagtttgttgcaagtcgataacgtggattccgttacgttctgtgaagatgtacttagccatcttagggttccagcgacgagtttggtgaccgaagtgtacaccagcctcaagaagttgtttcattgaaattactgccatgagtagtttctccttttttgtttttttctcctctctcagacgtcaacttgcaacacgaccacaagggcaacggcgccacaatggatccgagatgagtattttgttgttttagacaactctataagtatagcagaaatacctagaattcgcaagccatttgagagattttttcaacttcctccttctacaatcatttgagccaaaaagtttttcttgaccaatcttattttttaggttacaataatatttgttatggcggtatagccaagtggtaaggcacggctctgcaaaagcttgatcgtcggttcaaatccgtctaccgccttgataataaaattttttatcatcttttatcttttaaaaattcccctagcaataggggttttttgttgcacttcaggtttctttcttaatgttggatttcctaaagctcttcttttctatgccaagcacacctcaaaaaatcctaacaaatactctatgtaaaccaagggtcccctcaaaatgataaaatcgtaattgtcctatctgctccaactaccaagtacttaaaagttgttaccgatctgaaaaaacatcgaagaaaagagagagtgggacagaaatcggtaattcgttagaattcgatttcgtcgtcccacctcctcacagttgagtagggctgtaaaagctgatgaaatcagcgtagtagagcccactcaaccactgcgtcttgctcgacaatccaaaaataattgagaggctaggacttttgtcccagcctcatttcgtttcttacaattcagcaatttggttcaagttcacttctgcaaccgtatcgttaccgaacatagaaatgaccattttcaccttgttgttatcaatttcagtgatcttaccagtatagtctgtgaaggcaccgtcgatgatacgaactgtatcgcccaccttgacatccaaatcaaactcttgaacagtttgacccatagagagcaagatactgcggatttcttcctccaacaatggagttggttttgaacggttcccgtgtgatccgacgaaaccagtaacgttcggtgtattccgaacgacaaaccaagcttcatctgtcatgaccatttctaccaagacataacctgggaagcggttttcttcgatttcttttgttttaccatttttctcaacttgtacggtttgagttggaatctctacacgcaagatattttctaacatattgtaagtttgcgcacgttgcaaaagattctcttttaccttgttttcatatcctgagtaggtttgtagtacaaaccagcctttatcaaaactgtccatttgggcatcctttctttctgtttagcctgctcgagcttttgtgaacatactaaaaaaagcctcttggccttccttttcctagcttcattataccacattttgtaagaatgcaaagaggtttgctgatttatttttaagaaaagaccacaaaaagtgggagtgggaaagaactccgatataaaaaggttgaaaaggttccccaaaccttttcaatcttcccacccccgcatagctccaacagtctaggagactgttggaggttgcagataaaggaaacattgtttccgtccacataggccatctttgaagcttaaaaagcgaacaaagacttaggatacttgcttcgcaagttttatccgccacctcaaagcagtgctttgagcaatcagccactgcgtcttgcagttattcctatcaaaaatcaaaggctggacagttgttgcccagcctcttggcttcttttcttaaaagaaattgatcatgtgcaataggccacgtgcaatgactttgtcgaacaaataaatcaaagctacaaagaaagcggtgtactcaatcactgagataaagtttttccatctttccttgcgatttggccaagttgtatcttttagtaagacgaaaatatctttaatgaatttcacaactctctcctatcgtgtttctttatggatggtatacttgctgcaatgcttgcagaatttattgacttctagacgtgttggttttggtgtcccactcaacttaatggagtaattgcgtgatccgcaaaccgtacacgctagacttgctttttttagtgccataacgcctccgttcaccccattatagcaagatttctacattttgacaagaatagaaaatctagtgtccagaaaaaagcaaatctaaagggttatcccactggttttctcctcatttttggtaaaataaaacaaaaggagacgaatatgaaaagtgatcacctaaaagagagtaacaacattgaagatcggcgagggcaaagctactcccagtcttctagcaacagtaaccttggcggggggattttacagatcttactatcgcctggaagcctcaagagtaagatcatcattatcctcctcatagtctttctaggaggaggagctagtcttgggggactctttggaaatgggacttcttctcaaccttaccaatccacccaagtcacgcgcaccaacaagacccatgtcgacgatgcagatgcccagttcgtcagcaaggtccttgccacaacagaagatcattggcacaaggtctttcaagccgaaggacggacctaccaggagcccaaactagtcttctatactggacggacaaagacaggctgtggggtaggtcaagcatcggctggccctttctactgtccaaccgacaagaaaatttatttggatatgagcttctacaaggaattgacaaccaaatacaaggctagcggggactttgccatggcctacgtcatcgcccacgaagtcggccaccacgtacaaaacgagctgggaatccttggcaaataccatcggatgcaacaaggtctttctgaaaaggaacgaaatgccatcagcgtccgcattgagttgcaagccgattatctagcaggcgtctgggcccgctccattcaagaccgaaatcttctagatatcggcgatatcgaagaagccatgaatgcagcccatgccgtcggtgacgacactctccaggagcaagcctacggctactcggtgccagatagctttacccacgggacttcggaacaacgcatgcgctggttcaaacggggctaccagtacggagatttgcaacacggcgatacctttagtttgtcagatagtgaactctaaacaaagatctattcagaaatccttctgaatagatcttttagaagatagacaaattgcattttacataaaacaacttaagtgacgttgaaaaattaaaataattaatactattaggatcatttcaacagaaactttccgccgtgagaaaagtgctagaaacactagtgtttctagcactcgggagttttggaagtaaaatagttcggggaactgttttagcatgagcctaaaatttgaaaagcgaatgggttcaaaacgaattgaacacgggctgcggatcgtgtcaaaaagataagtcttcctagaatctaaagattctgcgtcaaacttcctattttgactttatccgcgaacgccctttgtatcttaatttagtcatggaacttcttcgaagttcgctgacgtccgtactcacctaaggaaagttactaagatgactttatattcaatctgcaaaaaacgattcagaaaaatttctgaatcgtttttttgattagaaaccaagccagcctttgaaggtatcccaagcgtttttcgcttttcctgggatatcggcctcgtcgattgctttcttcgcatcatcgaccatattcgacgccttctctttgacatcctcaaagaaacctttgtcttctttgctgtctgtttctgtattttcttctccgactggcgcaatgccattttcagcataagagttcttcaccgagtcaaactgagtaccgtctgtataaggcagaacactgttagcaacattgcggaagatctcggacgccgttccagcactactgtccgtcaggtagtgattttcatcggtcgttgggaaaccaagccattgactgatgaccacatctggtgtgtagccgatcacccattggtctccagagaggtccttgttaaagctggtctctgtcgtaccagttttccctgccatggtatagccataaggcgcagcgttaacccccgtaccattactaaaggtaccaagcatcatattggtcatcttatctgtcgttgaaccactaagcactcgggttgatttctggctgtggctcttgaccacttggccacttgcattttcgatcttggtaatgaggtgagcatcattcatgaccccgccgttagcaaaggttccataggcctgagccatctgcatcggattggttgtcacaccagctcccaaggcaacggcaagcgacttgtccaccttgtccatgttgagtccgaattttttcccgtattcaaagaccgtatcgagacccaaatcattagcggtcgctacggctggaaggttaagggattctgccaaggcctggtacatcggtaccgttgggctagactggattcccgcgtagttattaacctcatagcttccatattgggtggtactattgtccaattccttattggtcgaccaacctgccgcaacggctgggctatagaccactaaaggtttaatggtagatcctggactacgggcagcctgggtggcatagttgtaggtacggaaacctggattttcatcactgccgacgcgccctacgagagcccgaacccctccggtcttaggatcgagtgccacactaccagattccgcgcgcgtgccgtcttccgctactgggaagagggctgtattgtcatagatcacctgcatacttgcttggtaattttgatccagctcagtatagatccggtagccatttttgacaatgtcttcttcggtcaggccgtattcattgaccgcttcattgataaccgcatcaaaataggatgggtagcggtaatcctctgacttgccttcataagcatcgaccaactggccatggatatccacagccgctgactgatcagccgttgcctggtcaatataaccagctgccaccatattttggaggaccgtattgcggcgattggtcgcattctctaccgaatagagcgggttatagatttcaggccccttgagcatacctgcgagtaccgcggactgatccagacttaattgactggctgaaaccccaaaatacttcttggaagcatcctcaataccccaaaccccatttccaaaataggcattgttgaggtacatggtgaggatctcttttttactgtatttcttattgatttcaagcgccaagaagaattccttggccttgcgctccaccgtctggtcctgagacaggtaagcattcttggctagctgctgggtgatggtggatcccccacctgagcgacccagagtcaaaattgctaaaaagaagcgtccgtagttgatcccgctattcttgtagaagctccggtcctctgttgcgaccacggcatgttgcagattctcactaatggcatcgagttcgacataggttcctttttgcccggtcaaacttcccgcctggtccccattcttatcatagataatggtggtcgccttgagtgcattctgcaaatccttgacgttggtcgtctttgcgaggtagaagagataaccccctgtcaagaggctaaagcctagcccaatgatcaggagaatcttggtcaaatggaatcggcgccagaaacgacggaaggggtgttgagagagcggtttgcttctgtgcttgcctgagcgactataagtcggctctactgtctcttccggtagttccgtgtctggcacttcttctgccaccgctttgggcggatgatcctttctaaaaaaagtgatcaggttttcaaataattcttttattctattcatacctgttattgtaacaccttatccttgtcctagcaagaaaagatcgctcttccccttctcccatttagttttctttaagcttagattttgctacaatagggtcatgaactatcaatttaccattccacaatcctttccccagatgactgtgaaagagttgcttgaggactacttcctcattccccgtaagatccggcattttttacgaaccaagaagcacgtcttggtcaatggcgagaccatcaactggcagagccccgttcaaaaaggagaccagatccagctgatctttgacgcggacgattaccctgaaaaagagctcccagccggagacccgagtctggtcgaagaactttatcaggatgagcatgtcatcatcgttaataagcctgaaggcatgaaaacccatgccaatgagccgacagaaattgctcttctcaaccatgtttccagctatgttggatctacctgctacgtcgtgcaccgcctagacaaggaaaccagcggagcgattttatttgccaaaaacccttttatcctgcccattctcaaccgcattttggaagataaaaacatccaacgtgagtactgggccttgatccaaggaagtttagcgcaaaagaccatcatctacaaggataaaatcgggcgcgatcgccacgatcgacgcaagcgcttagtcgatccacgcaaggggcagtatgcagaaacccaggtgacgcaactgaaaaaaatcgggcgaaacagcctggtcaaatgccagctcaagacggggcgtacccatcaaatccgggtgcatctctcccatcatgggcacccgattatcggggatcctctctataaccctgcacgcggagagcgactcatgctccatgctcaccgcttaaccttcaccaatccattaacccttgaaaccatccaagtcgaggccccttccaagagttttgaaaaagggttgaaaaactgaaaaaaaagcaaaagaacatagccctgtcaatcaaggctatgttctttcaattttcgtagttgaaattttaacggtcatctgactcttttaatgtctgttttttcccattttttgaaaacaaaaacaatccaagtagagttgtcagtcctcccaagatactcagaacccattgagaacctgtgactcctgtacgcggcaaatgttgttggtccgagtcaatttgcttgtaatcagcagtagctgtcgagtcaactatctctttaaatgtcggatccactgtttcttttgttacatttttcgatggttttagaatatcttgttgaggatgatttatcggagtatgaggttgaacaggaataggttctggtgttggcgttggtgttggtgttggagctgccatttcatactcatatacgacatgagttgttccttcttttaagaaacctgatgtaggtgcagatgatggagaaagaccgactaatacatatttttgaccattcactatgagtgattgaggttgctcattcacattctccgctgcattatacggtaaaagttgtccatttgaaccataaattggtagcgttggagtatcgatataacggtcccgcagttgcctatcggtcccctttaggacataatccacaacaacatctccttgggacaaagttgatacatcctgatcggccatatcctctgtctctgatacgtaatatgtagcagaaccatttcttagcgtatagattcgaacaaaattaaaaaatgtctgttcatcaatattcgtatcatttggaatcgtagtccaatcaccattgttcggagtaatataggttttcgggttcgatacagatctaatcaagtgaccatcacgaacataactctcattaattaaggctggattcgctaaaacaccaagatcctcaacatcattatttgagtacacactatgcgaagaatactcctccaaatgttgagatccgttctcatagccagagagcccaccctcgctacttgacttccagtccattcgagcatcaatcgctaaatacttgtttttcttggcctcttctagtggaagagtgacagcaactcgaactgcttgacttttagaaaaattcgtataaatgctatatgacaacattttttcactatcaacaaaatcgtattccttattattaaccacataaggagtctgaccagaagcgacttcttctgcagttggaagattaaatggtatgttgtcgtaatcctcattcagagtttcacgatcaatcaccttcataggggcattgaccgcaacaggatttccattttcatcccttgtcccaactaatgtaaaatccaccttagcttccggaagattcggaatccgaattgcaagatcactcaccgtcatcatttgatcactagagtgcattctttgataagcaactgtataggagtaggtgacatgttctccatcactactgagtgttgcaggatgaccttccacattcacatgcccaccgtcacttacaatattatcttgttgagaagaagccacgctctctggttgcatcacaggattcgcttcatttaaatcttgagaattagatgtcaaaacagttgatggtgctgaagaagtactatctgtattctcatctgcgtaggcaattgttgacgtaaaggcatttaaagtaactactgaaaatactgcaattcctaattttgtcaattttttcattattcgtctccctttcataaaaataatagaccggttcacaccaaatattatttttatcactatttattgaaatggtacgacaaagaaatcctattgtcaaataattatttcaacttcaaattatcctacacaaattccgaataatagcctaaaaaacagaaacatcatcaaattttttccccctttattacaaaataaacaaaaaataacagaatataaacaaatcttttcagcaataaaaatttcccttttagagactggctacaatacaatgaaaactcttagaaatgctgatatcccactattttttaagagtttttactttctataataaaagaaaaagattgaagaaaattgtgtccaaaatggactttttcttcaatctgaaaagatgcaaatgtttcttctttactattgataacgtgggctagcaaaacctcggatattgccatgaccgattcggtaggtttttctacgaacctgatcatttgagtttccttcaatggtgtgaataaccccatttgaaacgctctcaacaattccaatgtgatctgcaaaaccattattaggctgactatcttgatcccagttgaaggtgataatatcccctgcttttggtgtagaacctccatcttcattccaaattccaagacgtttgaaaatttgaatgtgacgttcgactccacattcacgaccaactaaatcactaagaccttcgcgttggaaaatcgttgttacaaagacatcacaccagtcatctgtattcttcactgcataacctacagggagagggcgcacactgttataatcattcactaattgttgatgtgctgcactacctccacggaccccaaccagactggctgcagctcgtagaacacgatcccgttgaccactgtcaacacgaggactcaagcctgtttgtccagttgtaccacgcggattcaaggccgtttgaccaaggttaaatccttcaactccaccatcgacatagtctacataaacgtgtgtcgtatagttgccagcaaggttcttatggttaacagccgaaacctgaacatccgtctgcgtaccagtcggtgctgttgaataccagtaaagattttcttggtgatcttgagaccaggctgcgacacgaacatttttaatgtgacgaccctgaggggcttgatccacttctaccatataagtccctgcttctacattgacatttttaataaaggcacgtgttttcgtattggcattacggaactcaacttcagttgaagaagccaacacacctactcgactaccgtcattttgaatatagtaaaggtggacatagtacaagcctgtagaatttttgtggtcgctcgctttgacggataccttataatctccattcgcctgacgcgctgcttcataccagcggatatcatcttggccgtccttagcagaccagataggaacctgaacaatacgaacgcccttaggactgtagacatccttgatgataacgtcaaaggttcctgtatccttgttgttgttttcgatagaaagggtaccggataatggttgttctttcttatattccgcaaaggctttctgaacaaattggcgttggccctgtgcatcataatagaagatctgtgcctcatagcgcccatcgacattttcatggtcacttgccttcgctacaactttataagagccatctgactgacgaactggggtataccacttgatatcatccatacctttggcatgtgaccaaaatgggattttgatctctttgtagttctcaaagccttttaagttcttagcggttatcgtaaaggtacctgctgacttatctacatcaattgaaagatctgccgatactggtacatttggcttacctgttgaatattccgcaaaggctttttgaacaaattggcgttggccctgtgcatcataatagaagatctgtgcctcatagcgcccatcgacattttcatggtcaatagccttcgctacaactttataagagccatctgactgacgaactggggtataccacttgatatcatccatacctttggcatgtgaccaaaatgggatcttgatctctttgtagttctcaaacccttttaagttcttagcggtaatcgtaaaggtacctgctgacttatctacatcaattgaaagatctgccgatactggtacgtttggtttacctgttgaatattccgcaaaggctttttggacaaatttacgttggccctgtgcatcgtaatagaagatctgtgcttcatagcgcccatcgacattttcatggtcaatagccttcgctacaactttataagagccatctgactgacgaactggggtataccacttgatatcatccatacctttggcatgtgaccaaaatgggatcttgatctctttgtagttctcaaacccttttaagttcttagcggtaatcgtaaaggtacctgctgacttatctacatcaattgaaagatctgccgatactggtacgtttggtttacctgttgaatattccgcaaaggctttttggacaaatttacgttggccctgtgcatcgtaatagaagatctgtgcttcatagcgcccatcgacattttcatggtcaatagccttcgctacaactttataagagccatctgactgacgaactggggtataccacttgatatcatccatacctttggcatgtgaccaaaatgggatcttgatctctttgtagttctcaaacccttttaagttcttagcggtaatcgtaaaggtacctgctgacttatctacatcaattgaaagatccgccgatactggtacattgggacgtttgccaatagatacctctgttgaagatgtcgttacgccaatttgtttcccatttagctggttgtagtagagatggatgttgtatttacccgttgaatttttatggtcgctggctttcacactaaccttgtaggtaccatcgttttgtttggcagccacataccataccaaatcatcctgaccattcacatctgaccagattggaacggatacagatgcaacgccatttggagccttgacatctgagattaaaacatcaaagcgtcctgtcattgtgtcattgttaatgacggaaatctttccactcaaattaccttgggttggatccgacgtctgtttataatttgctgtaaatcgccctgtataatcaatattatgatcaaaaaggtgtttccctggaagtaattctgcttgagaagagaactgccaagctcctgcctttccattataacgaagagttttagcatcattcgcagaaagtttcggcgctggatactgagcaacccaaaagttttcaatcccaaactgcgcagtattaacaggtccttttttatggagattattttcatctaaccagctagcgcttgtgtaaaacatgagattggtatagccattttttcgcatctcatcagcccatgcttgggtattgctgttaatatttggttgcattttagcatcctcaaagtcattgaccataagagtgctttttggaagccccaatctttgagccgcagctatataaaatcttgcttctgcacgcgcagcttcttccgttgtataacgtgaaaaatggtaggtggaaacttgcaacccaaccgcctgtgcatttcgaatttgtgaagccgcatttggattgttataccaagtgttttctgttaatttaacaaccacaccaccaacgcccttatttgcaagaacgcgatagtcttctacactgatatccccattgtgactactaacatccacgaaggtctttggctgtacagctacatctgttgagcgactggcaggagcatgagaacccgcgtcaaaaaaagtagatgctcctactgaaggtttttcttgagaagctgttgtagttgattcggttgcagaggctgtttcttcggaactcacagacgacgtaactgctgaagctacaggttgagaagctctttctgtagattcgacaacagtcgctggagctgtgtagcttgttgcagggacaagctcttctcccgttttcgtttcaacagacggtgccacttgttggtgattgttatccgctgtaactggttcgtttgaagtcacttcatcagctttcgctacttgtgcagatacagaaagtaacaaagctgcacttgcaaaatagattagatctttctttctcatcgttcttcccttatacatattttatactttacctattttaccacacggcttaattgattgaaagttttatagtggaaattttctaaattagtgataaaaaatggagatagcactgggcttctccattttcaaatatacatctattttttatcacctataagatttctaaaaatttttttatagtcgcttccttcagtatcacaagcataaggaagtagaataaaaagtataaaattccagataatcctaaatgaaaaataagattatttattacaactaaatggtttatccccagaacaaaaattcctgacagaagtgctgaagatgcgaatttcataattgatctaaatggaatatttccccttaaataatctacagaatatctatactgaacaaacatttgcgtaaactcagctatcaaagtagcaagtgctgcacctaaaacgcctagtatcggcataaggaagaaatttaacattaaattcacaaatgccccactagtcactgcgttcataaaatatttctctctccccgttgggattaaaatctgattgcctgtgatatttgaaaaaccagaaatcagcaatataggcattagcatttgcattgctacagtagcttccacatactcattgcctcccaataatagaatactgtttttagcttccaacataaaaaatacagttaatggaatcgagatgaaaaatatgacagatatcgattcacgcataatagaattaaatttcgaggtttgtttctgacttatatagaatgaaaaacgaggcagtagaactgtacttattgatgttacaacagacagtaagatccactttaccttagtcgcaacagaataaagtccaacagctttatttccatttataaaccctaacattactgtatctaaattagtgtagacgttcaccgcaagcaatgacgcaaataagtaccacatcggttttacatgatgtctaaatttcaaatcctttcttatcttgaatgagacgtaccttctacattgaataatatttaaagcattagaacttagaactgaaaacaatgttatcccagcatatataacataatcatctgccttacgcactaataagaatgttaatatcagtgatacaaattttaataatatagaacgctttgtaatataagaatattcctcaataccactgtaaaaccaattaagagaaagaggggatacaagaatcgtaatacaggtgatcagcaataatcccatttcagatctcaattgttcaacaccaaagctaacaaataaaagtagaattgagacaatgaccgacataaaaatattaatcaatgttaattcttgaaatacttttgttaattcttctttatcctcacgaacttttgcaactgctcgtatcccataagtcgaaattcctagagaagccaccaaaacacaataactactgatagaagtgaaaaacgaggtggttcctagtccaattgggtttagtattctagatacgtatggaaatgtaaccagaggaaaaacaatattagataatgttaaaagaatattatagattgcatttaccttgattgatttttctttcattcttaaatcccatcctttaatttcaaaaccaaccttctaattccaaaaacaatcgtgcaatatgttttaggcagtatcgttaagaatggtactttatcgaacaattgataagaaaaatctacccataacaaatcttttttcgctgctagtaatctttttctcgaaaatcttactttttctttaacaacaacttctccgaagttttcgacaacctcttctctaagagagtttcgtaaattgtatagttttggaacaaacacacattcttttttcaacgaattaacaagaaataaatcatataactcatatggaagagaatctgtcctagtataggcatccaataagatatcgatcccctcaatcaacttttgttgaaaatcattgactttttcaaatactttaacatgtttgaaatgctcatctaaaatcggtaatatcttaccattaacattatcataggcaacaactggaccatgatcagcaacaaaaatatcctcataaatttcataatttcggctaataatatcaaaaaaaggtgtcttatgagggaagtcattaaacatgatcccaaatttattatttttagatatcgattgataaccattgtacttaagaccaaaataatatcccacaactttcttatccggtaatgccttttgaatattatcttggatagtccctttccatcctatatcaacgatataaatgctgtcatcttgagtcaaactcgttacataattcctaaaattgctgtcttttgctttctccaatttatatctttttataaaacatggatttgatttcaatttttcaagaactactgaatttctatcaattttatgagtcatatcaacttgcaaatcagaagatatattgctgatctcatctcttgaaaaatttaaattaagtaaaaaattctctagactaatccttttatattgcctaaaaataatatcaaaactttctatttctaatttttcaagtgatgggtatagagttgatcttctcgatacataaaaatagtctgtattgattttattttcatggaagtaactattttgatactgatcaaacaacgtttttaatagttgaccttcacgtgagcaaaataaaatttgtttgaccccatctttaactagctggacatgcaacttcgaaataaaatacagtatatctgcaatgaatccgttaaacggagcaatttctgcattaaagtacaacgtttttctatacaagttttttagttcttttttatcaacaatagaacctgttacatgtttatactctttaaaataagatgccagaccgagattcattggatttattacatcagatttataattatctccaatcatcgttacactttcaggtgccacattcaaccgagataaaaaaacttcatataattttcctgtcgattttcgagcattatattcacttgaaacaaaaatatctttaaaatatttcctgattccaaaatgaattaagacttgattcaatagagaactatctgcgtaaaagtcagaaataatataaagcaattttccgttttcatatgcttgacaaataaactctaccgtatcattatctaagtatatatgctcgatctcgattttagtttctaactcttttgcaaatgttagaaattcttctatcgttgctataataggcgaatctgctaatctatttaattctttaaatagctctcttaataaattatcataagggacctcttccagcccttgttttttagtgtcatattcaactttttttctggctttgtaaatcgaggatggggtcacagaaaagtttaaatataatgaaatttccttagcccactgaaataaaatagtttcaggatcacaatcacgatgaacaatcgtatcaaaaaaatcaaaagctacgatattcgtatctattttcttttcattaattgtagtcatgtttccacctaattatccatcagaatcctaacaatctgtttacaagccgtaccatctccataaggattacttgcttgactcattttattgtactctgtttcgtcttcaaggaggagtttaaaattctcataaatattctcctcatttgttccaaccaacttcaaggttcctgcagcaataccctctggacgttctgtcgtatcacgcattacaagaactggttttcctaaggaaggggcttcttcttggacacctcctgaatccgttaaaattaagtaactttgattcataaaattatgaaaatcaataacttctaacggctcaataattttcatacgttcattttctccgaaaaccttacttgcaagttctcttactctaggatttttgtgaattgggtagactaccttcacatctttgtactcatttaatatacgtttcacagctttaaacatatgttccattggttccccaaggttctcacgtctatgggctgtcaacataattaatttacttcccttagcccaatctaaaataggatgacaataattttcctgaacggttgtctttagtgcatcaattacagtattgccagtaacaaaaatattttttcgtccctcttttatcagattctcttttgaaacttctgttggagcaaaattatattctgagatgatagaagttgcttgtcggttaaattcttctggaaatgggctttttagattatacgtccttaaaccagcttcaacatgcccaactttaatccccatataaaatgcagctaaggatgttgcaaatgtcgtggtcgtatccccatgcacaagaacaatttctggctgttctttttctaaaaccatttgaattttatccaaaatagatgttgtgattgtgaataatgtttggttttccttcataatccccaaatcataatctggttcaactttaaaaacctctaacacttgttttaacatttctttatgttggcctgtgacacatacaatcgtttttattgaatcattctgttttaattcgtttaccaaaggacacattttaatcgcttctggacgtgttccaaaaactaacattacttttttcatgatatactactttccactcaaaaaattaagatttgattacaataaaagggtaggctgcatcaattctatctgttacaccatcccaataatactttaagatctttatattattttccttacctatcaatagcctaaaaagaaatctagcatacaggtataataaaaatttgataaactgatatcgacttcctatatttcttttcacaaataccactctgttcctgttcattaaatactcttgtaagccagataccgattttattgaaacagagcctttatgatatataaaataatttgttaaacaaatatttttatagcccattagtgtggctttataacaccattcagtttcttcaaaaaacaaaaaataattctcaggaatatagcctatttccttaaggagacttgttctaaatagcatacatgccccaccaatataatcactttgtacaatagcaggtaattcttttcttgataaatgatgattttttaatgtaacatatcccttatctaaaaaaatatctccccctgtcgattgtataagatctctattcttgtattctacaagagcagggctgacaaaagcaattgaattatcattatgcaacttttgtacacatgcagtcaaaaaatcctcttcaataagggtatcattatttaatatacagataaatgggtaacctcttttttctgctatttttataccaatattatttccattagcatacccatgattcactctacttggaatcacctcaatattatttaatgaattttttaatttttcaatgctatcattggaagagttgttatctaccacaataatatcaaatttttcattctcaatacttgattgtagacttctaacgcaatcgattgtgtcctgataattattatagttcaaaataataaaacatactttatccattcttattgtccttccgctttaattgataatcataaaagaataccatagcaagaattattacaagagaataacttctctgactgccaaaaatattaagagaaggggctgtaatcaaaatatttgccatcagacctatgaataaagatcgttcataaatgtattgtttcgttttcattcgtcggattaatttcgttaacatgtataaaagataaccatataagaaaatagccagtagaccaaattgaacaaataactctataaaaccaaggtcgtctaaatacatttgaactcttcctggtccaaataaaatgaaataactattagggtttgaactagttaatatccccagcccatttatccaacggtaatctgttaatagtcctagatagtattttaactcccaatatctatatcctaatcccatatcagaggtaccattattaaatgcatctatccaattcttaaaccattcacttcctccaaaaaagaagaaacaactgatgcctacaatgacaaataataaatataatggcatataaggaaatttatgataaacatacattagaatcatcgaaaatatttgaggaaatattaacattctcgtttgatttacaaatatggcaaatagcaacataaacatcaatgtataaagatatttcttatctctatacttgagaaagagataaaatgttaaaaacatagcaatggaaattaaaggagtcccatccactctaattgatgtttcgtttctataccataatttaccaaattccatcaatatatttggaaagagattggccttcaaaaatgtaaatgagaaccacgagaaaaatcgaagtagcaaagatacggacagaatacttagtgtattatccaaaattcttttcatttttttctcatcattcgcaaaaagataaatcaaaacaaaaaataatagaacccaagtatattgtcttatagcatagaaaatttcaatggaagaatagaaataagtattggttgctcttatgatttgatagagaacacacgacaaaaaagtaataccgaaaaaaaatgctgatctcgatatatttctgatatttagaagtagcgttggaatcataagaattagagtagttatcgataccacggttagtaaatttctatgaacaaacagactaacatttaaaaacaaaaacaaacccacagaaagcgctacagaaatataataaagtaattccactaattctatacgaattcgtctcacatttgcctccattatctcaattcctcaattaatttttcaattgtagaaactctgttttcccaattgttggcatttaagaattgctctcttgaatcctgatcgtatttaatatctgttgcctgcaataacaattttagttgtttcttatattcatcataactatcatatgaataagtaaacttactaaatctctctatttccttatacctaaccgtcaagatatctttattaaaattgatgtactcatacaattttacaggatcaactgcttcaacaatatcatttaatgtaaatggcatgatgagtgcatcagcatcttttatattagaataaatatcttggtggtcaacactaccaaggtacttgattctatcgttttcagggatagtcactccacttactggcccaattaatcgatactcaatatcctcaaattcatttaaacttttcaacagaatatcaaaatcaaaccaatggctgatggtcccaacataagcgaaaatatattttgggccttttcttttttctgctggtacttctaatatctccccattatatccgtttctaacaactttaagtttagagtcatcgattacttcttgaaaatctttcaacaaattggagcgtaatttttcactagataccaaaatgaggtctgccctagcaattaatttagtttcaagttccttgattcgttgctgctcgctattttcagtaatgaaagctgtatgataatccatacagtcataaataacctttcctttatagttattatcaaatctttcaaattgattaggatgtgttaaataaacaatatctggatcaaactttcttgctactttttttatctttcgggaaacaatccaatcatttactgccttaagttttgcaaatctagttataaaggggatactataaatgcgggaaagcttcacactattttcattcctatttagagtgagaccttttctattataccaataccgataaagaacttccacatggtaattcttagacaatccttctgcaatgaagtgaggtcgttgttttatccaattccattcaacgttcattacataaagtatttttttcatgttatctttccttccccatcaattctaagaaataactagaagattcaaaattacacttgtttgaaaagatagttttttctaccaaatttgaatatacctgatttgtcgcaacattttgatgatggagaacttttatctctggtgtatataaacgtttgtatccttttttttcacattcatagtccagaatttctgtttcaaaatagaaaaatgtatttggattaaaagcgaacttctcattttttatataatctttagagtatacgataaaagagccatgtaaaattggatttacgacggttttcttataattgctttctgaatttcttcttttccgatagataagtgttcgtaattttttacttgctttaagccaacactttattttcaaataaagactgatctgactttcttttttatatttttgatttaattttttgacttcatcataagtataatgtgaacatcgttttggattctgatgaagatgataagtcgttgaataaatatcaggaccgagtaaatgaaatttttctcgctcatatatttcactaactttttcctcgaaattgttagtttctatttccacatcattattcataatgacaataaaatcagggttatatttcaatttagaatattgataggcgacattatttcctttagcaaatcctaaattttcgtcatttattaacacatcaatttcttcatcatctttataaaattcctgtaactgttctcctgttccgttatttgagaaattatcaatgatgattatttttttctgattgcaattactttcctgtatagatttcacacaagaaaccgtctcatcataaaccttgtaatgtaaaatgatataacaaaacaaattcttaccctcctatatgcgactttctatcttcttcagcaggttcttcgtaaaaatagttttcaccatacagcctcttcagataattatcataatcagacggaactctatactctgtgtcttcaaatctcaaaaaaacaccttttccccaaatctcggaaggcatcacttctttagtgaataaagaagcatttactgtaccagcataacgttgttttttccaatcatatcgcttatacaacctatccagtcggttgtaaactgaattttgaggaaacagttttgcaaaacctagttttttaaacaatccaatcagcaatttctgctttttagaatgcatatcaatatgatcgcctttataagttgttcccaaactagctaaaaaacggtaccaatacactttaaggtaatacacctttctgactaaactattgttaggagcgccatcaagaggtatgatatcaataagatgcaagccaagatttgtattcctgggtagtcccaattttattctctcatcttcaagtagaaaaagacgtggaaaataacagtgtaattctttacaatactgatgacaaagaacctgatacttacctgcaattattttattttcaaaaatttgtggtagctgatcataatcttccctgggaacggcaatatccacatcatcatcccaagggataaacccttggtatttaactgctcccatcacactcccgcctctcaagaagaacattagattattttctttacaaatcttgttgaattcttttaaagcatccagctcaatttcttgaattttttttaagacttcaaactgtcccattatttcacccgctttttctcttttacaactttataaataaaactaacatttcccacaaaataacgcttaaagagccgtttgggttcattggccacacgaaacaaccactctaaatttgctttctgcatccacattggcgcgcgcttgatatgacctgataggacatcaaaacttcctccaactcccataaacacagagtttactccattatccataaacttctggatcaagtactcctttttaggagaagtaatgccgacaaagacaaaatctggatttttttttcgaatatcttcttgaataatttcttcctcttcagcagaaaaataaccatttcgacggccaactacctgtaaatttggataatcttttttaaagacggctaacatatcagttaatacttcctcttttgctccaaataaatagacagaataacctttttcattggctaaatgaagaagttcttgcatcaaatcaattcccgctacacgctccggtattggagaacctaaaaatttactagctaaaaccacagatgccccatctgcattgatgattcctgattcattaacaatctttctaatctcctcatcatcatggcattgattgatcttatcagcatttactcccattaaatggagagccttcttttcaagtacatagcgctcaactgaattgaccgtctcttgcattgttaacgggtctatatctatacctaatatgttgattcttgcttttttcatctttctcctaacatggaaaggacgaagcaggcttcccctacttcgctccttctttcctaagcacaacctttatggttttaagcaagatctgaatatctctccagatcgtccaatcgtccatgtacgcaacatccagtttgacaacctcgtcaaagtcggtaatctcactgcgtccgctcacttgccaaaggccagtaattcccggcttgaaactgaggcgccgtttttgagcaggtgtatattcttggtattcatcgaccgttgggggacgagtcccgactagactcatatccccaattaaaacattgtaaaactgtggtaactcatcgaggctggtcttacggataaagcgaccaatcggtgttactcgcggatcgttctccatcttgaacatgccacctgtcatggtattttgagccatgagatcttttttaatttcctcagcatccacgcgcatagagcggaatttataaaagttgaaataccgtccgttcttaccgacccgcttttgtacaaagaaggcaggaccgccatccttacggatcagagggactaggacgatactcgccaccccacaaatcaagaggccaaagagagcccccacaatatccaagagacgctttgcaaaaacatggctcggtttgtaaaaattggtcgagaaggtgacaacacttagtcccccaacttctcgaacccgtttattgcctagggatgcgaagttaaaggcattgaggttgaccgatacgtcaattcccatactctcaaactctgaaaccaattcactgatattataatcctcacttggcaggttaatgaatacctcatccaccacttccttggtaacgaaagccatcatttgatccggttgcacgatccgcacaccagaacgggtgaaacgtgtagtatccataaccgtcacaccaatcagttccccatgaaaaagacttccagaatgtaacgtatctaaaactttttccatccgactagttgctgtaatcaggaagatcttcctactacttttcaggtgggaagcaaccgaccgtctataccttttgagcataaggtccatgacgtaaacagagagcgtattaagaaggaaaaaataaatcatccctcgacgagagatcgaaaaaaaaccttccatcataaaccaagtaaatgtgatggctactgaaaagaatacattgtatttcagtacttgtagcaactcatccaaataacctcttgcataaaaacggttggccaaattgctgatgtaaaatacaacaaaatgcaagagatagagaatagcaatcgactgaggcgtgtattctgcattcttaaagagacttacaatgtatgccgaaaataggactgctaaactttgaaagagaacaatagttaatttttcaagttcgattctttcttctcccatttcctttaattcctattccttatttctttccgtactctccgtaagatccgtatcctccgtacgaaccatactcagcagctttgatgttaaatttattgagaatgactcctaagaaaggagttcccgtttgttccaattgttctttagctttttgaaccattttacgtcggtttgtaccggattcaaccaccaatactgttccatcacagcgttgggcgataatcgccgcatcaattacgactccaattggaggggtatccacaataatgtagtcatagtgcctgcgcaaagcttccatcatcatcgtaaaattcttactttgcaaaagacctgttggattgggcgctatctgacccgactcaataatatctaaatttgggaattctgtcgtatataggacttggtccaattggctctgaccagataagaaatcagtcaagccttggatcttctcacgactacggaaaacacctgtcatcacagagttccggatatcgcagtcaaccaagagagttttgtaacccgcacgtgcaaaagctactgctaaattggtcgatgtcgttgattttccctcattttcttgaacagatgagacagcgatgacttttaggtctaccccgcttaattgaatattggtcgcaagagcattgaaatactcctccgccttatggatttcttgtaatttattttttgaaatttctaatgtattcatgctatcctcggtctacaatttcttaatatctggcacaacaccaagtaggggcaagcccatgagttcctctacatcttctggtttcttgacacgatcatctaagacttctaccactaccaagaggaccaccatcaggccagctccagcaacaaatccgagaaggacattgcgcttgatgtttggtgaagacggtgattggggcacttccgcctcatccaaagttgtgacatcggacaccttggtcacggaagtaatcttctcagccgctacatttcgaaggccattcgcaatccgggcagcttctttcggatctccatctttagctgtgatcgagaggatccgggtatctgttggaacagaaacattgatcttttttgataactcagctggcgtcatatcgagtttaagttcctcgatagcttgactcaagacattttgagaaaggataatttcacgatagtctttaaccaagtaggcacccgcttgtaaatctgagtttgtcaaggcattgttgtcctgattttgacggctgaccacatagatccggctagtactttggtattctttcttggctaaaaatgcactatagccaaatgctgcaatagcaaagacaagcgcgaccaaaatgattgaaaatttgcgtttccacagaaccttcagcgtagcgaaaacatcgatttccactgcttgattttcttgattattcatgttctaatttactccttcatgtggatttttctccacgtgttttatggttagattaattcatctgctaacaagagttcttgattgccgacaaagagagcttgtgcgcgttgttctccgtattcttccttgatcaagtgataagcttctgccatatagggtggccgtttatccacattgtgcatgtcactggccacaaagtgtaccaagtctttttctaagaaataccgagctcgttttttcagttgtttttgctcatccccaaagagacgaggcttgagaacactcgagctattgatctgcatgtaacaccccatatcaatcatctcttgcacgcgctcctcatttttctccaagcacttgtagcgctcgatgtgggccactactggtgtgatgcctagatgaagcaagcgatccaaagcagtatgaatctccttataaggcgttcccatgctgaattcgatcagagcaaaacgcgtctctgccagactgggaatggtcttttcttccagttttttcaagacatcattggtaaagtagatttctgccccgtaatagatcttcaaatctggtgcgacttgcgccgcaattttcttcacttcttgaaaattttctgcaattttttcttcaggggtttcaaacatccccttgcgacgatgagaagtagagataatagtccgtacaccttggcgatagctttcttccaacagggcacgcgtatcttctcttgtctttggtccatcatccacatcaaagacgatgtgcgaatggatatcaatcatttttcatttccttccattaccttttgaatggtttccttagcttttgtcaagcttccttgatccaactccatgacatagaggttggatccaggcatagcataagatggcaaatcggtacgcccttgtccggtgattgcttgggaagtcacttcataagagccacccgtttccaattgggtattgatcaggttcatcatagttggtaactgcatgttggtttgaacggaatcttggaggtttccgataatctcattgtagttactcaagacctttgtagaggtcaactttttgataatcgccgcaataactttttcttggtttttcccacggtcattgtcgccaccttgaagagagtagcgttctcgaacaaaaccgagtgcttgctctgaattcaaatggacctttccaactgggaaatggaacttgccatgaaggctcgtgaattcttggtcattttccacatcgatcccccctagaaggtcaattaacttgaggaaggaagtgaaattgagacgaacgtagtagttaagcttgatatcatagagattctcaagggtatgaatagaagcatccactccgtagatccccgcatgggtcaacttatcattttggttgttacctccatccgcaatcggtacataggcatcccgtggtgtcgttgtcaataggacttgcttggtcttacgattgaccgtcatgatgatattgacatctgatcgagaaaccgatgttaccggaccataggtatcgatcccgctaacataaatgttaaagacatccgcattggcagacaccttgctcgtcgctgccacttctttccggattttgtaggagtagattttctttaatttcttcgcataatcggcatcttctgtagcaatcgtatcctcaaaggtactattcaacactatagcagtggcactaccgtcttgcaagctcttataggcatccagataagtcggtgcgtctactacggagatttcctgtcccttggtctttttgatattgtccaaaagagccgtaaggttggcttcattattgttgccctttggcgtcaccacttccttgatttctttgatatctttaatgtcactgtctttcttgacataaactgccatctcaaactctgtatagttggagtgcccattgacattgctagtcagattcaagagttgttgactggcaaacagaactcctgagctaatcagcaaaccgcccaaaagcaagactacggtcgtctttttagcctggtttctaacaacaaaccaagtagataagagcaagaagacagctagtagtgcaatcacgagaacattgacatagcgaaaagccaagatattattggctagcatggtatagatcgcccaaatagctgttagaaacaaaaaaataagcaagacggaattaatgattcgcatttgcccccatttttgaattgagcgacggcttcgtctcctttgcgacataaaaacctccaattagtagtttgtcatatttattataacacatttctactaaatgacgcattatttatcacttttttgtccattaagtacaattaaaatgcaacgagcctctgtaaacgatcgtatgccttgcatatttatgcatagaaactaaaaaaaggctggaccaaaatgcccaacctccaatgaatgatcgtcatcactatatagcgcgctgatatattgttcaaagtcccgctttgagggagtgacttacgaaataaatttctttcatttttttcgtatttctatcccagagctcatctcgcatcttctacctccaacactctccaggggcgtttgccccttacgaatctgagactattgaaaaaatttggaagtctttttaaactaagactagaaatacgaaagcagaacgatttttaaataaaattcgttctgccctacttctttacaaatgctctatagcaaatcatcccgtttgacctgttcaaaactttctttgccatcattgagcttgtcccagatgacaacctttccttcttttaatgatttttgaacatcaataatccgctggttagaagaccctcggaactgcaacatgaggttgcgtttactcttatcatagcggccatcgaccagaatatcaatcagtgagagaagctctagtttgtctggtgtctctagcatcatttcttcccaggtgtagcctgtccatgaccagatgtctttttccggcaattctttccgaatgcgtttaacgagaggcaaaagaattccagtattcaggaatggctctccaccgagtagggtcaaaccttgaacataaggttgggccagatctgccatgatctgctcttctaactctttggtatagggaatgcctgcattgaaagaccaggttgctacattgtaacagccctcacagtgaaacatacaacccgccacataaagggagttgcgcaccccttctccatcgacaaagttaaaagccttgtaatcgatgatgcgtccttgactcagctcctcactcttccattcgcctggttttggtgtattccatgtcatccttctactccacttctatccaataacgctccgttccatttcgaacatcttcaaattggccgccattagctaagataaccgctcggctggcaggattttccgtgctacaagtcaccagagcacgatggatgttcttttctttagctacttgcagaccttgatggagagcttccttggcataaccttttcccctttcagaagggcggatggaataaccgatatgaccagcataattcagcaatccctcatttagtctcagccgtagattcaaaaaacctaaagcatgacctgagtcatcaaacaatacgaactgaattgatgggacgcgattttcaggcaatcctattcccatttctttattaaggttagtttctagccactcctcataatcaaagttttcagcatcccaaaagccgccatcgtgggctgattgagtctgttcaaactctgccatcatctctaaaattgtttctttatctgccaatgtcggtctgcgtaattccatccttacctccccataagagaaaagcgagagcggactctcactttttcttatttttatttaaaaattgctctctcaggctggctactcggtcttttttattgattccaccctttgaatgcttctcgtggaatcgttgaacctgagccttacctttatcatctaattgatattttcccataatgtccttttctaacctgtcacttggtggccagctgatttgatagtggatccattcatgtgtttgacccgtgccgcgatttccttatgacggccattgaccatcggacgagcttgagggtttcctagataaccacaggtccgtttgaccacatcaaccgttttcggatcgctgttgccacagtttggacaagcaaatccgcgctcagtcggcgtgaaatctccttcaaaatcacacttgtaacaacggtcaatcggcgtattggttccgagataaccgacccggtcataggcataatcccaaaccgcctcaagggcttttggattttgttggagcacagggtattcacaatagtggataaagccaccagaagctccagcttcaggataaactttttcaaaatccaacttctcaaatggcgttgggttcttacgaacatcgtagtggaaactattggtgtagtattccttgtctgtgatatccggaaccttaccaaatttctccgtatccagacgacagaagcggtctgtcaagctttctgacggtgtcgaatagatagagaagtggtaatcatactggtcagaccattcttccacgcgcgctttcatatccttgatgatatcaatcgtgaattgttttgcttctggattgtgttcccaatttggaccataaaagacggttgcgacttcatagagtccgatatagccaagagaaacagttgctctgcgatgacggaagagctgatctacctggtcatatttacccaagcgtttcccgaaagccccatattggtagagaatcggtgcattggctggtgttgcttctttggtgcgttccacccggtaaaccaaggcatcttcagcgatgttcatccgttcattaaaaatttgccagaatttttccttgtcgccgtccgactccaaagcaatccggggtagattgactgtcacgactccaagattcatccggccagaattgacttccacaccattctcgtccttccaaccttgaaggaaagagcgacatcccatcggcaccttgaaggagcctgttaattctacaatcttgtcataagacaaaacgtctgggtacatgcgcttagtggcacattccaaggccaattgcttgatatcatagttaggagttccaggttctaggttgagcccccgcttgagggtaaagatcagctttggaaagatggctgtccgatgttccgatccaagtcccttgattctaatttccaaaatcgccttttggatttcccgttcgaagcgattggttccaagaccaaagccaagcgaagtaaagggagtttgtccgttcgaggtaaagagcgtattgatctcatattccagcgattgcatggcatcatagatatctttttgagtcttgctccaagcatagtcctcttgcttttcaggaagtacccactctttggcatctgccaagtgtttttggtagttcttttctgcataaggggccaagacttcatcgatccggtcagctgagcaccccccgtactgactagaagctacattggcaataatctgcgagatttgagccgttgcagtttggatggacttaggactttccacttctgcattcccaatcttaaagccatttctaagcatgccttcaaaatcaatcaaacagcagttggtcatcggtgtataaggactatagtccaaatcatggtagtggatgtcccctttttggtgagcattggctacgtgtttgggtaacattttgaggccaatagacttaccgacgatccccgcagtcaaatcccgttgcgtattaaagacatcgctatctttattggcattttcattgacaacagcttggtccttgttgaggagtttgccgatggtaaagttgatgtccgtcgcttttgagcgctcaaaatcccgctgcgtccgataagtaatgtagctctcagcaatcgcatattcgttggcttgaagcaattcatgttcaacgacattttggatctcatagatcttcacgccatttgggaatcgctccaagatctctgcgatcacacgatcgacaatggcttctagtttggcttccagcacgggagtgagagaagccacttcttctgtcgccttcaacaaggctttataaattttttcaacatcgaattgaacacgacggccatctcgtttttcaacaaaaatatccggggccattctcagtttttcttctctcaaggtgatcataccaaacatgcctttcttcattcatttacatacaagttgtattataccactccaaaaataaaaatcaatatcttgtggtgaaaattctaaaaaactttccaaaacacaagatattgatttcattaagaccgttgatagagtttgaaatgacggtatttcttctcaactagacggtaattttctttcagcaagttcttcatatcagaggtcaactctacctgattgttgactacaatatacttgggttcagaccgatcgatttgttgaatcacattggtccgattttcatttatccccagataagaagttggggtcaataaagcagatgccgccaaacgatcgctttcttgatagagagtagccgtcgcatcccaagcatagatggtatccttcgacttggtgtgatggttaatatagctggcaatcgcgctccgttcactcgattggccagactgaagcacgacatcttgaaccactggatccaccaataaatagacaagggccactagtggtaagaaaacttggctcgtaaagtaagcagcccaaacttccttgtttttcttcttccgaccacgacgttcagtaccctcgctcgcttccccatcacgtgagaaccagactgcaaacaagggaagaacaaatggcaacatcggtaacaattggtaagcgccctgttcaggaagaccaatagacacaacgaggataaccagactacctacccatcccataaagcggaagatccggcgagcactgctactttgcttggtaaaggacatcaaaaaggcagaaactagaccgaaggccagcgccaacagtccataataaatggcattactgaaggcctgtccattactaaaattcaaggcattaaagacataggttacttggttaatggcatagccaaaagtttgattccaaacggtgatatagccaattggataaaagacaagtgaaaaaccaaggagagctgccagcagttgataaaagccacgcgcccatctcttctgcttgatgttaaaggctgttaatccaaggaaggccaacaaataaaacagggcactggtcatcggatcaatcaagaaagccacagctgcaatcgcaccataaaggataaagccttcatccttacgatgcccaatcaaataagccaaaatgaaattcatgctggcaaataggattggaagactaaagagagtcacataagtccctccaaaaccaaggcctagcaccaagaaataaaagagcaactggacattcttcgatgtatctgtatctttatctgacaccagcaagcgcacaacccgatagaggtaagtccccgcaaagaagagggcaatcgcttgaaggatcatcaagatccaatgtccaccagctaaacttcccaaccagttgattgcataatagagcagaccattggttccgtaaaaatcaccaaacggtacttgacccttggtcattgcccagccagcatacaagttttgcgattgttgattggttgcaaaacgggttaaaaatggcaccccgacatgcagcaaactaattaagagactcaacacaaaaggaatcgctaggggcactggacgcttagcttgacgacggatcggctcaactgccacatccgcttctagctcttccgtatcctcttctagcttagatgcttccgcttttgtcgcttcaactcccgccttacgtgaacgacgactcatccgactgagcggttgctccgcttcctgttccgattcttgtgtaggttctgctactgtttctggctttgcatcacgaataggctctgatacctccattgcaaccggctcctccaagacttctgcctgctggctatgagtcggctcttcttcacgaaagactgatttatctagcacttcgcgaatttcacgtgtatcctgaaaactatctcccacgtgaagccctaactttttcgaagtcatttcttgctctttttcgctcattctttttccttttcttcgctattcctctgctctttccttttagaaaaaagcccattatcttctctagtataccaaattctgccgaccctgtcagcctcttgccacatagtcctatggaaaaagagtcaggcatctcgattcctgactctgattttcgtttttatacatttacaacatcggtgcgaacaattgcataatttccttgattaagctttggtgccatgtaaagcggaaggtatcctctgtaatttcttgagacacttcaaagatatggtcaaagtcctcacgaatctttttcaaggcaggcgtccgatacatccagacagcattttcatagtgatggaccaaactgcggtaatcaaagttaatcgaccctacaaccgccatttcatcatcggcaagaacttgcttactgtggacaaaaccaggtgtatactcataaatctttactcctgcatccatcagatccaagtaagccccacgagttacgatttggatcaattttttatctggaatatgcggggtcacgatccgaacatctacccctcgaagggctgcattgcggatatcctctgtcaaatcatagtcaatgatcaagtaaggagttgtgatgtagacataatccgttgcttgattgatcatattttgataaaccgtctttccgacctgcgacttgtaaatcggctttggtccactcccataaggaatgtaaagcccttctccctcaaccgccttgttttcaatatggtagcggtcaaaatcctcgatttccccacggttgatgtaccagttcatgagaaacagtcgggtcaaggctttaacagctcgtccatctaaacgaatggcactgtccttccagtgaccaaaacgctcaatgtgattaatgtactcgtctgccaaattgacaccacctgtatagccaatctgcccatcaataaccaaaatcttgcggtggtcacgattgttataagccactgttaagcgggggatcaccttgttaaatttatgggcatcaattcccatctttcgcaaccgtttggtatagttccctgccaaggtcgccatacagccgatatcatcataaaggagtttgacttcaaccccctcttttactttctgttctaaaatctctaggatgctgttccacatcaagccctcgtcaatgatgtaaaactcgatgaagataaattttttcgctgctcgcagatcctctagtagttgcgcatacatctcctcccctagagggtaaaaggtcgatgccgtcccattgtagagatccgcattgtggtccatggataaaatcgacttgaccaagccataaaccgccttgctttcttgcttgagctccttacgcaactgatgactattgtcctctcgaaacttcatggactccatattttccaactggatcatttccttcttggacaaacgtcgctctccaaacatgagatataagagcgatccaaagacaggaatgacggcaatcaagagccaggtcaccttattttcaggaggggtgttgcgattgacgatggccaagatcgtcgacacatataagagcccaataaccacaacagatagccaatgagggaaccatctgttaagccagaagaaggccgcaaaggatgcccatagttcaaagcccataaacaaaatactaaatccatatttggacattaatagacgtaattttcgaaaggtcacagcatcctcctttttttctttctactagtataccaattctttttacccgttgcaacgaccaaccaaaccccttctagacaaacaaaaagagagtgggacagaagtcctagcctctcaattatttttggattgtcgagcaagacgcagtggttgagtgggctctactacgctgattttatcagcttttacagccctactcaactgtgcggaggtgggacgacgaaatcgaattctaacgaattaccgatttctgtcccactctctcttgtttcgtcccttattgcttggttaaaacgataatcccttgatcatcctctgcttgctccagatcttctagcgacaactgattcccttcgatccgatagcgatagggttcatccccgatacgcatggattgattgaccggatcaatactgacctctttgggctcttcttctccatcagcatcttgtaccgtaaacgtgccttttcgccccgtcacaactaagagaatcgtattttcctcgtcctgtcctcgataactgccatctatggacattccttctttctgttcttcactcgctgaagtcacagtctgtgatgaagtagacgtctgtttgctcgaagtctgtgtcgctttttcttgctggctacaagcagtcaggaaaagagctaccgccaaggtcagtatagacatgatttttttcattaagatcgactcctttcgccataaccgtatactatctaccaccagtatacgccaagaaagtctttaggtcaattgtttacccctctaataaaaatgcccttacttctgcaataaaatacaaggaacctgtcacaaataaaacctcatctggatggctctgatccataaactctttgatataggccttgtagtcagccacataaggcaggtcttgtcgatcaccctgcgccaccacttctccgtaatggaaggttgtcaaaatcaattcagcttctggcaatcccgtttgaagcgtttggagcatcccgctataatcttttcgcttgagggctccaaataaaatcttcacgcgctttcctgctaagctattggcaaactcgatcaaacgcaacatagcatgaggattatgggcgccatccagatacacctggtcgccaaacaactctagacggcccggccaccgcgtttcttgcaaggcgtgcttgacctgatccatatctacttcttgatctaggccttccatatagaggagaaaggtctccagagctactgcagcattttcccgttggtaatcacccttcaagcccagagacggccagacaagatccacacgttcattccaaaaacggtcctgctctaagccaaaatctttctggaaggcatggagatccacatccaattgtccggccctttcttgacaaacagctacaacatcatccgacaagggacccaccacagctttcttgcccttcttaaagattcctgccttttgctgggcgatttctgcaatcgtccctcccagtgtttcctggtgatccaggccgaccgaagtgatcactgcgatctctcccgtcactacattggtggtatctagaagcccaccgataccaacttccaataagaccacgtccacagcttgttccttaaaatacaagagggccatgaggcaaataatctcaaaataagagagttggtcctgggtttgaagcaaggtccgctccatttgttggacttcttggccaatccgagtaaaatcttcatctgaaatcggctgatccccaatacaaatccgatcatggatactgatcatatgaggagaagtaaaggtcccaaccttctttccgtgagccatcaacaattgacgcagaaaggcgattgtggatcccttcccattggttcctgtcacatgaaggataggataggccttatccggcctccctaaaaggctcactgcctgctccatacgatccagtcccgatcgaaaattcagaccgatccgactattcatccattgctcaatcttattcacatcttcctcctaaaagaaaaaagcgacaaaaccccttctgacgtttgcgctcctttcttttgtagttatttctttctcatttttacagcaagtccatcggacttaccaactctttctagtttctaggagttgaggtgatacaatctcccagacttaccagctctctcgtatttcaaggagctgggctaaaaacgtcccccggacttaccaactctttccaatttcttggagctgggctaaaaacgtcccccggacttacttgcggtctttatttttagcgcaagggtaaaaatgttcactgaacatttttactcctccataaagctgttgaagacttcttcgatcatatcccattctgcatctgagtcttctgggattggttgaaggtcgccttctgttccgtcttcgttttctgtaaatgaataagcttggatttcaacttcgccgttttcatcttcttctgcatttgcagggatcaaaaggacatagttctttccaaattcttctttgccatcgatggtcaaaagaatttcaaacaaggtttcatttccttgttcgtccaccaatgtgattaattcacgttcttcatggtcgtggttatgatcatgtgccatactattcttcctcgttttctttctaaaaattgcgatctaaataattttgtaaaataagctgcgccgctaacttatcaatgacttttttgcgtttgctacggctaatatctgcttgctcgatcaacatccgctctgcagcaactgtcgtcaaccgttcgtcttggtagtcgactggcaacccaaacttttcagcaatcattgcgccataagcctgactagcttccacacgcggtccgctggtgttgttcatgtttttcggcaagcctacaacaaaacggtccaccttgtattgagctactaattcggctaaacgctccaaaccgaattcttttttgtcttcatcgatttggatgatttcaagaccttgagctgtaaaaccgagaggatcactcacagcaaccccaacggtctttgagccaacatccaatcccataattctcattagaggtctattccttgccctttcaaataataacgtaccaattcttcaacgatttcatctcgttcatatttacgaatttggttccgtgcattattataacgaggtacataggcaggatcaccactgagtacgtatcctacgatttgattaattggattgtagcctttttcatccagtgataagtatacatctttcaaggtctcgctaatttccttacgatttgaatcatcaagattaaaacgtactgtttcatctgtaaatcccacaagaacaccctctttccttagaatattactattataccataatcaagagttttccacaacggtcaagtccttgattttacggctttttcaagcatttttgagctttttcaactaaactgttttttatttttgctcactcgctccagcattgatgaggttgtccgcaaattggctcggtgtcagcttcaacaactccggcaagtgattgtttttgaagtaggtcataccttcagccttcttcacatccattgcttcaaagtcataggtgatggtcaccttgtattcattctcattttccaaggtcaaatcagctgtgaagccaggaactgtcaatgcttccttaaaggcatcatccttggtaaaagattctctcaattgcttttgcgcttcttcgactccaacctgttggatcccttttttcagttcctcatcagttgccgtcacattgacggtctctaattttttaaaggtattccccacataggtgacgatttgcgtctgttgtgtccccttatcatcttttggaaagacaaaggttctagtgatgactttattttcttcagccttttgcagaatactcttattatccttttgcagctgttctgcttttgcttggattgccttttgttcacttgaatttggcgttttcgcttgttttttttgaccacatcccgtcaaacacaatacaagcgcacccaataagaagattttccttttcattttccattccttactagttattgttttctaaaatattgtatcatagatttcgtaaaatggcgcagtaaactgcttttcattccgatttttaacaagaaaaaatcagaaacaaattgtttctgattttcattcgctttaaagagctgcacgcatccgcgcttctgcattttctacatttcgaactgatcgtggcaagaaggcacgaatatcatcttctttgtagcccacttggagacgtttgtcatctaccaagatcggacttttaagaatacgaggtgtttccatgatgatgtcaatgacttcattgacactcaagtcttcgatgtccactcctagatttttagcgtatcgattttttgaagagacaatacttgccactccattttcagtctttgtaaggatatccaataattcttctttggtgatcccttccttaccgaggttttgttctttataggttagctgatgagcgttgagccaagtctttgcttttttacagctggtgcaacttgacactgtataaattttaatcatgcatgcactcctttcgctacacgataatactatcgtattaaattataacacaaaaaccatcagtctagcgacctattttgaaaaaaattaatcttcaatttcaatcgcgtcatctaaatctagagttacttcttctacgacaggagctgcttcttcagttttatcaagggttttcactgcttcgtcttcttcgatcaaaccaaaatgaacccgaaccttgtggtcgatttcgtcaaaaatttctgggtggtcagccaagaatttcttagcattttcagatccttgaccaattttttcgccattatatgagtaccacgcacccgctttttggatgatatccaaatctgttgcaatcttcaccaactcacctgtacgtgaaattccttccccgtacatgatttcaaccatggcttctttgaacggtggagctaccttgttcttcacaaccttgatcttggtttccttaccaacgttggtatctttttggtccccagtccccttgatttgagtatttccacgaacatctagacggacagaagcgtaaaatttcagggcacgaccaccaggtgtggtttcagggttcccaaacatgaccccaactttttcacgcaattggttgataaagatagcaatggtcttggtcttattgatcgaagctccaagcttacgcatcgcttggctcatcatccgagcttgcaaaccaacgtggctatccccgatatctccatcaatttccgcacgtgggaccaaggctgcaacagagtcgacaaccaccaaatctaccgcaccagagtcgatcaatttaccagcaatttcaagtccttgttcccctgagtctggttgagacaagagaagttcgtcgatattgaccccaagagctgctgcataagatggatccaaggcatgctcagcatcgataaaggcagcaatgcccccttctttctgtgcttgcgctactgcatggagggcaacggttgttttaccagatgattctggaccatagatttcgatgatccgaccttttggataaccaccagcacccaaggcaatatcaagcgccaaggaaccagagctcatgacttgaactttttgctctgcacgttcgcctaaacgcatgattgatcccttaccaaaatccttttcgatcaacttcagggcatcattgagcgctttttcacgctcatctccaaatttcttagagatgtcatctaattttttctgttttttcgccattcttttctcctatgtttttgctatacaggaaatgcatgcaactcactgacgttttccgtcctttgaaaggcacatttcctatccatttttagaattattcttcatttggcacaagcttcattataccaaattttcaccatttaatacagccaagcgtaccaaattaaaggcatgaaggactgcaatttcgcggacatcagctcggctacgtccggcgatattaacttggacactatccactccatttggagttgcaagtccgataaagacggtccctgctggatgcccttccagactatctggccccgcaactccggtcaggctaacaccataatcggatcctgttaacttacgggcctgtgaagccatggcttgagctgtaaaatgagacaccactccatgttgctctaactcttgagctggaatagacaacatcttgcttttttcttccagactataggtgacaaaaccacctgcaaagatgctagacgcccctgaaaaatctgccaaagtcgcttggaaaaggccagccgtcaggctttctgcagctgtaatggtcttaccagtccgtttcaagagatcaaaggccaccttggccatcgaattatcatccccataaccgtaaaacagttcatgcaagggttgatggtccagggtatggcgtgataagattttcttttctaagacatcgagcttatcatccgctgaagcttgatccttcgcctttgtagacagacgcaaggtcacttcccccgtcttggcatacggggcaaccgtcggatcactctgcttttcaatgatatctgctaggatcgtaaccagctggctttccccaatcccaaagaagcgcaagactcttgaaaagagctcttcccctgtcgtcaaatgaggcaccaattgttcattgaccatgggttttaactcacttggtggaccaggtagaacgacataggtcacaccgtcgacttcaatcaaacctccaaccgcgagacctgtacggttttgaagggggattgaaccggcaatcaattgtgcttgtcgctcattattgggcgtccggacataatcagggcgactggcaaagaaggtgtcgagtttggcaagcgctgttggatcaaaaaccagttctttccctaagaacttagcaagagtttgcttggtcaaatcatcctctgttggcccaagtccaccacataaaatcaccaaatcactgcgttttgaagctgtctcaatggtcgataagagacgaccttcattgtctcctaccgccacatgataatagacgtcaatccctaaactagccaatttttcagacaagaattgagcattggtgttcacaatttgtcctgttagaatttctgttccaactgcaataatttccgccttcatggtgcctcctacttatactattcgtaattttcatttcattttaacacaatttcctaaattatttaaaaaacagattgaagataaagtccattttggacaactttcttcaatctttttcttttagagtataaagtaaaaaattcttagaaacactattacatcaacattcctaagagttttaactatgtggtaatcaacttctaaagggctattttctattgttgatagagcttatctatattctgaagcaaccataccgagcggttgcttttttacttctttcttgatctaaaagcactcttctgaaatcccacatagctttctcttatcttttgtgatacaatagcatcaatttatttctaggaggatgagatatggtttctactattggtattgtaagtttatctagtgggattatcggagaggactttgtcaagcacgaagtggacttgggggtccaacgactcaaagacctcggactcaatcctatctttttacctcattcactaaaaggcttagactttatcaaagaacatcccgaagctcgtgcggaggatttgattcaggcattttctgatgatagcatcgacatgatcctatgcgccatcggtggaaacgatacctatcgcttgctaccttatctttttgaaaatgaccaactacaaaaggttatcaaacaaaagatttttcttggcttctcggatacgaccatgaaccatctcatgttacataaactaggaatcaagactttttatgggcaatccttttttgcagacatttgtgaattagacaaggaaatgcttgactatagcctttactactttaaagaattgattgagactggaaaaatctcagaaattcgccctagtaacgtttggtatgaggaacggactgattatagtcccaaggctctgggaacacctcgtgtcagccatgcaaatacaggttttgacttgttacaaggcaatgctcagtttgagggagaaatcctcggtggttgtcttgagtctctctatgatatttttgacaactctctacacgcagacagcatagacctctgccaaaaatacaaacttttccctgacttgtcagactgggaaagaaagatcctcttgctagaaaccagccaagaaaagcctaatcctgaagacttcaaaaagatgttgcggactttaaaggacacgggtatattcgaggtcatcagtggactcttggtcggaaaacctatggatgaaactttctatgacgactataaagaagcactattggagatcattgatagcaatatcccgattgtctataatctaaatgttggacacgcaactccaagagcaattgtccccttcggagtccacgcccatgtagatgcaacggagcaagtcatccactttgattataacaaagaaagctgagataagactctcagctttttctatattctctgatgttccagtcatctaacatcacttatttccacttttccattcacaatcattctcatggtcatcaaccaatcctgctgcttgtaggtaggataaaactgcgactggtccggtgaacttaaaaccacgctttttgaggtccttggctagcttctcagaaagagctgtcttcgctggtgcttgacggtaatctggaacatcattgacgatggttttcccatcgacaaaagaccaaagataggcatcaaaggtgccaaattctgcctggacttgtaaaaaggcctgagcattggcccgtgtcgcaaaaatctttgcacgattgcggatgatggctggattgtctaacaaggattccagttcagagtcggtcatctctgcgacgcgttgaaggtgatagccatgaaaagattcacggaaagcctgccgtttattgagcaccgtttcccaagatagaccggcctgataagtctccatacagagcaactcaaaaagggcctgatcatcatgcaggggccgaccccattcctcatcatggtaggctacatagagagggttgctcattttgacccagccacagcgttttggcatagagttctcctatttcaccaacatcttaagggcagacttgatgtagttttcagcagtatcagaagttccctcaaagaatttcttgattttcttaagttccgttgccttgtagcccaatgccaacatggcttccatagcttcttcaagggcttgattttcttctgcaactttggctttggtctgagccggtgcatcttctagatcaagattgatcttaccttccaagtccagcaccatctgttgggctgttttcttgccgatcttcggaaacttggtcaagtaagtgatgttcttgctttcgatggcttggacaaggcctgcattgtcatccgcagcaatgatggccagagctgagactgggccaattccagataccgagatcaagttcaaaaagagctgtttttcttcttcggtcgcaaagccatagagaaggtgagcgtcttcacggaccacttggtgcagatagacttgcacctcttgattcattttgccagagtaagcatagggattggccacatgcaagagatagccgattccagctgtttctaccacaatgtatttagcggtgattttcgttaaaattcctttaatgtattcgtacataatcttcctttattgtttgtttaatacttgcccaattcccgtagactggtgtgattttcttgaatgcgtcggaacatcttttccatatctgacttggtaaagttaaccaaaaccggacggccatgagggcagttataagggttgtcacattgggacagttgatagatgagatcccgtgcggagtaatcatccagtgtgtggttggccttgatggagcgtttgcaggacatcatgatggccaactcagcccggtatttcttgatggacacttccttggtcaagaggagcatgtcacacatttcatagatacccgactcgatctcttcctccttcatccagatcggatgctcccgcaagatcaactggttagctccgtattcttctaagtagacgcccacttcttctaagaggtgcttgcgctgttgaaggcggatcagatcgtctgtagggaattcaaaaatataaggcactagcagttgttgctgactgccgtccacgtccccgatgctctcccggtattcttcgtatttgacgcgctcttgggccgcgtgctggtcaatgatataaaggcccccattgccttgggcaaagagataggttccatgcatctgaccaaaatattccaactctgggaaggtcgaatgttcttccccatccaacttatcataggccttgtctagactagccagatccaactctgggtgatccaattcatcataaaccacagcctttctttccgcaaacttgatcgcgcttgtcggtttttctactgggtttccttggcttgtagaatcagtagctacctcttctgttagaggcagttgaggatctgccacctctggtcgaagtttgaaatcttgactttctcggtcataatagagacggttttcttttaaaggcagagtcgtctgtaccggcttttctgttcggcgaatggtcgacttggctagattttctagagcatccggaattaggtcctgctctttcaaagcattcgcaatagcctgggagatcaaggccattagttctcgttctttggagatacgaacctcttgcttagtggggtgaacattgacatccgctaagtaagggtcgatctggatattaatgatcgcgagcgggaagcggcccaccatgagtttactaccgtagccatctaaaatagcccgattgagcaagaaattcttgatgtaacggccgttgataaagagactgatgtaattgcgattggcacgagtcaattcaggcaaagacacaaagcccgtcacttcaaaatctaggtcgcgattttcaatagccaccatcttcttagcagacgcgaggccatagacgcccgcaatcgcctgccggagattacccgtccccgctgttttggtcatttcttttccatcattgatcaaggtaaaggcaatttcaggatgagccaagctcaagcgattgagaatatccacgatatgggatagctctgcctgctggctctttaaatacttgagacgagcaggtgtattaaaaaagagatcttccactgtgatcttggttccgacagggcttgtcgctggctccaattcctcaatttcaccaccctttgcgaccaatttggtcccgtgggcagctccttcttgcgccgttagaagggttagaatactgacagaagcaatggaaggcatggcctcaccacgaaaaccaagcgttcgaatacgaaaaagatctgcttgactcttgatcttactggtcgcatgtcgacggagggctaaagcgacctcatcgtgcgcaattccttccccattgtctgtaatccgaatcgacttcaatcctgcttcttcgatttcaacaacgatctggctagccccagcatcgatcgagttttcaaccaactccttgaccacactagcaggtcgttcaatcacttcacccgccgcaatctgattggctaagacttctggcaattcaataatctgtgacatgtctgctcctttacctattttttcaccgatacatgtagctctattataccacagatccacaagactccctttcttaaaaaacgtaggcttgtccccatcttcttccttaaaaaccgcataggcaaagaaaacaaccacatagacaaatccccttgtcttccctttggaaaaagtgtttaatagtagtgtaaagaaggagccgggctagcaggccaaccgactttacccaaaggagggagaaacgatcttatgaaagttgaagtacaaattgattcccacttccaagaagaagcggtgatgatcacagcacctgcactgtctgcgcgtgtagagaaaatccgagactttgcgagagagctggatcaaaaagggcgcttacgtgccaaaaaggatggggaagcttatctgatcgaaagccagctattccaacgtttttacattgaaaatcggcaagtgattggtgagaccatgacagatcaatttatcctgactggtccactctatcagctatctgaagacttaccgaccttctttctcaaaatttcccaatctgaaattattaacacccaatccatcgatcacctgcactttaccagtggaggatcggtgcaaatctatctcaaaaatgggagtctgacctactcctcccgtcgttacttaaaagccattaaggagaaattatcatgctaaaacaatctttttctgacgccctgaaagggattctcattgggctcatcttatccatcttcttttcctatctcttctcacctgagttgtaccttcccttaagtcccaactctgcagtcggccactggatgttcttgcatcatgttcacggctcactggtcatgctctattgtgccctcgtttggggtgcaattggggtcctctttagcttcggaagtctcctctttcaaaaagactggagcctcttacgggctactctgagccattacctactcatgttacttgggtttattcctctggctactttggccggctggtttccagcacgactcggattttacctctcactcgttgtcgaattcaccctcgtttacgtgatcatctggttggtctcttatcatttttataaaaaacaagttcaagaaatcaatcaaaacattgctaagcactaagagaaaaaagactgggcaaaaactgtccagtcttcgatgtttaataggcataactgtatgacgcagtggttgattggtatctttgttcgcttattaagctccaaagatgacctatgtggacggaaacaatgtttcctttatctgcaacctccaacagtctcccagactgttggagctatgcgggggtgggaagattgaaaaggtttggggaaccttttcaaccttttttatattggagttctttcccactcccttttttacaatttctttttcaattcggcgactgccatcatgacttccatgggagtcatattgtagagatccagattcttcaattctgtgatcaccgtattttctgcttcctcctcaaagagggacatttgttcagcaacctgcgaagacacttcctttttaggagttgtatccgcaagcggtacttgctgggcttgtccttcaagcttgatcaaaatcgcatccgcccgctccagcaagtcttctggcaaaccagcgatcttggccacgtgaatcccataggacttatccgctgggccgggttcaatcttatgcaagaaggtaacctgaccatctcgctccaaggtcgcaacatgaacattttccaaacgggtcaaagtctctgagagtgccgtcaactcatggtaatgggtcgcaaacaaggttttggcaccggtgcgatcgtgaatgtattcgatgatggactgagcgagagccatcccatcataggtcgcagttccccgtcccaactcatcaaacaaaatcaaggactggggcgttgccttgcgaatagcgtgattggcctccatcatttccaccataaaggtagactgacccgataccaggtcatcagcagctccgatccgggtataaatcgcatcaaagattggcaactcggccttttgggctggaacataggaaccaatttgggcaagaatcacaatgatcgccaattggcgcatataggtagacttcccgctcatatttggccccgtaatcagctgaatatcccgttcttcatccataaagatgctattaggaatataggactgggctcccatcactttctcaacaactggatgacggcctttgtcgatcgcgattcgtcgttcttcatgaaagaggggacgattcaactgttgcgactcagcgacactggctaaactttgtaaaacatcaaccgtcgcaatcgcctgagctaactgttgcagacgttggatatacttgccaacttcttcacgaatccgcataaaaatcgtatattccaaattagcagacttgtcacgcgcctcaagcatatctccttcgatgcgtgccaattcctccgtaccaaagcgttctgaatttttcaaggtcgccttgcggaaaaagtgagcaggcacgtgactcaattgagaattggtgacatgaaaatagtagccgtccttcttgttgtaatcgattttgagacctgtaatgccgctggcttcgcgctccttggcttcaatctcagcaatccaaccggtaccatcccgaagaacaacacggtactggtccaattgctcgtcaaacccagtacggatgatatttccctctgtaataacagcagacgcttccggagcaatagctgaggtaatcaagcgatgcaactcgggaagttcatccaagcgtgcaattaagacatctaagactggatcaccaatccccagtagaatcgacttgatcgtcggcacatgccccagagtatctcctagctgcaagagatccttaggattgatcttaccaaaggaaacccgactcgctaagcgttcaatgtcatagacccctttgaggctgtcggtcaaatcgctccgttcaaagaaatgatccataaagacctgaatgatgtcctggcgctctcgaatccgtttcaaatcgactaagggtttctgaatccaggaccgcaacaaacggcctcccatggccgtcttggtttcatccaaataccaatacaagctaccatgtttcttcccagtccgtgcattctctgtcaaatcaagactagccttggtcgcaaagtccatctgcaagaaatcgcaaatctcataatgatgggcttttttgaggtgactcaattcccgcatttgtgtctggtggacataccggagaagttttccagccgttttcttttctagctcactcaactgatcccctaagagttgaacatcgtcaagctccgtctctacatgtgacagcaaaagattcatctggctaacaaacacacgctcttcttgttctggcaactcataacccaggaccacctcacgcgcacgtaaattgcggatttctccacaaaccatgctaaagtcattgagggtcgtcacctgaaactcccctgtcaccagatccatataggctagcccaaaatcatttcctgaacgatccaaagcaactagaaagttattctcactatccggcttggtcgaatccaccactgtacccggcgtaatcacctgtacgacttcacgcttaacgacccccttggcttctttggggtcttccatttgttctgcaatcgcgaccttatacccctgttcaatgagaacatcaatatactgctgggccgagtggtagggaacacccgccatggggatcggattctctgcatttttattccgtgaggttaaggaaatctctaaaatttgagctgcagtcactgcatcttcataaaataattcgtaaaaatctcccattcgaaacagcaaaaaggcatccggatagtcttttttgatatctagatactgctgcattccaggggatattttttctactgtcatacttctttattccttactgttgcatcatttgctgacgcaagctccatagatgaaaacaggagtagatagctcactatcttcctccttttgacatctctctttctctccaacggggcttgactactgcatcatccctaaaatttcattttgaatttcaatggctgcatcttggtctcgacagacaatcaagagggtattggcccctgctactgttcccaaaatacgctcatctgacatttcatctacaccattggccaagagagctgcttctcctagctctgtccgcaagaccaaggtgaattctgctcgtgagacagactttgcatggctggacaacataatataaatctctgccacctcaggctcatttggcaaaatataatacaactggtcttttcgtttcaccttgactagacccagatcgcgcaaatctcgtgacagagttgtttgcgttacagcaattccttttgcttctaatcgatcctgaatctctttttgagtcgacaatttttcatttcgaatcatttgttgaatcaaaaggtgacgttctgtctttttcattggacctccacttttgaataaatatactttaaattataccaaaaaaattgaaaattcgctcagaattgtgttaaaataatagttaaaaggactaaggagctaatatgaataataaagaactcattgctagtgaattggccaaagtgattgactctcttgaccaagatgctattttaaatttgcttgaacaaccaaaatcatctgatcttggtgacattgcttttccagccttctcacttgcaaaagtggaacgcaaggctcctcaagcaatcgctgcagatattgctgaaaagatcgaccaaagcgccttcgaaaaagtcgttgcaactggaccttacgtgaacttcttcttagataagtctaagatctctgatcaggtgatcaaatctgtcattgaagcaggcgcagactacggccaacaagacgaaggacatggtcaaaacatcaccatcgacctttcaagtccaaacatcgcaaaaccattctcagttggtcacttgcgctcaaccgttattggggatgctctttcaaacatcttccgcaaaatgggctacaacacgattaaaatcaaccacttgggtgactggggtaaacagttcgggctcttgatggtggcctacaaaaaatggggtagcaaggaagctgtcgaagccaacccaatcgatgaattgctaaaactttatgttcgaatcaacgctgaaatcgaaaacgatcctgagcttgatgaagaaggacgtaaatggttcaaaaaattggaagatggggatccagaagcaactgaattgtggcaatggttccgtgacgaaagcttggtggaattcaaccgtatctacaaactcctcggtgttgagtttgatagcttaaacggagaagctttctacaacgacaagatggatgaaggggttcaaatccttgaagacaaaggcttgttgaaagaatctaaaggggctagcatcgttgagctcgatgatgtcaaccttccaccagctatgatcaaaaaatcagacggtgcaactctttatatcactcgtgatatcgcaaccgctatgtaccgtgcacggacatacaactttgtgaaaaacatctatgctgtaggtcaagaacaatccaaccacttccgtcagttgaaagctgttctgaagaaaatgggatttgactggagcgacgatatggttcacgttgactttggtttggtgacaaaaaaccgccaaaaattgtcaactcgtaaaggaaatatcatccttctcgaaccaactcttcaagaagcgatctctcgtgccaaagctcagatcgaagaaaagaatcctgaacttgaaaacaaggaagaagtggcacatgcagtcggtgttggcgcggttaaattctacgacttgaagacggaccgccgcaacggttatgacttcgacctcgaagccatggtatccttcgaaggagaaactggaccttacgttcaatacgcttacgctcgtatccaatcgatccttcgtaaagccaatttcacaccatctacagatgcgacttacagcttgagcgatcctgaaagctgggaaatcatcaagcttctccaagacttctctcgtgttgtcaaacgtgctgctgaaaactatgatccatccttgatcgcaaaatatgccatcaacttggctcaagccttcaacaaatactatgcacacactcgtatcttggatgaaagcccagaacgcgaaagccgtcttgctcttagctactcaacagcagtcgtcttaaaagaagcccttcgcttacttggtgtcgatgcacctgagaaaatgtaaaatgacacaagtagttgaaacaactattcccaaatagaaaaaaggagatgatttgaactgcaccccaaaagttagacagaaaaaatctaacttttggggtgttttataatgaaattaacttatgaagataaagttcaggtctatgaacttagaaaacaagggcgaagcttcaaagagctttcaaatatatttgggataaaaattcccaatcttcagtacatgattaaattgatggatcgttacggtatagagtttgttaaaaaggggaggaatcgttattattctcctaaattaaaacgagaaatcattgataaagttctgattgaaggtcgttcacaaataagggtgtctctagattatgctcttccaagtgttggaatgttgcctaattggatagcacaatataagaaaaacgggtatactattgttgagaaaacaagagggagaccgcctaaaatgggacgtaaaccaaagaaaaaacctgaagagatgacagagttagaacgtcttcaagcagaaaatgagtacctgagagcggagaatgctattctaaaaaagttgagagaactccgattgagggacgaaaagaagcaagaagaaaaacagaaattgttcaaggattggtaacagagtttcctttagatattcttctaaacattatcaaacttgctcgttcagcctattattaccacttaaagcaactgaatcaagtagataaagatcaagctatcaaagtggaaatacaagccatttatgatgaacataagggaaattacggctatcgtagagttactcttgaattaaggaatcgtggttttgtagtgaatcataagaaggttcaacgtctgatgaaggtccttggtttaagtgcacgtattcgtcgtaaacggaagtattcttcataccaaggagagattggaaagaaagcagataaccttattcaacgccaatttgaagcatccaaaccaatggaaaagtgctacacagatgtgacagagtttgccattccggcgagcagtcaaaaactctacttatcaccagttttagatggctttaatagcgaaattatcgcctataatctttctacttcgcccaacttagcacaagtgaaattaatgttggaacaagccttcacagaggagcattataaaaatacaattctccatagtgaccagggctggcaataccaacacgattcttatcatcgattcctagagagtaagggaattcaagcatccatgtcacgtaagggtaatagtccagacaatggtatgatggagtccttctttggcattcttaagtctgagatgttttatggttatgagaagacgtttcactcacttaagcaattggaacaagctattgtagactatattgattactacaacaacaaacgcattaaggtaaaactaaaaggatttagtcctgtgcaatacagaactaaatcctttggataaattaattgtctaactttttggggtcagtacaattgatctccttttttctttaaatgaacaaaaaacgctgagaaatcagcgttttttataaatgatacaaatcctctataatagtagccacttttttgatgtctcccaacatcccccgcatttcaaaatcggctaacatggggaaaccaaagcgttggctgtattgcttagcggttaaacaatattgattgttaaaattccgattgcctgatccaaccactcctaagcacttgctggcgttgtctccataagcaataaaatccgcaacatctgtcgtcaaaatttccacatcaccattatcaacaccatttccaccctccaaataggttggcaaaaaagtgataaaaggattggtcatttcaaagaaggactggccctctttgactaggtctttcacatgaactttctcgatttcaagttcaggatgggcttccagcaagtagttacttaagcgacggacaaaactctctgtattcccactcagactaatataaacaaaggatactttcatcttttttctccaatcaagaagctctcttatcctctaagagagctccattcaaacttatctattatgccctagcttgagcttttctcaaacgcaaggttttatacaaaacaattccaaggaagagaagggataaagcagtcaagagtaacaaagcaatggacgaagatgccagatatcgttggcgaagggacggggttgaaaaactagctaatagtggacgccctgcaaaataattatagcaagagaaagcttgacttaataaaatctgccccatgtaagtataatgggctgttaacagatcctgcttcataaagaggaaatagaaagttgccagtaaggcaatcagaatcagggaaacaaataaaaaggttagtggagactgattgagttgggctgatttctcataatatgccacatagtcagccttgtcttgagccgttgttaaaccaagttgtttcgcaaaatcatctgtcagctcaaaactctttgaagctccaaaggttgagacagctgaagtcagggttccaaccgtagagaaaaataacaggatgtaaagatagataggtttctttttcatacaaactccttttcatttcttacaccctattatatcgcgatacagatagaaaggcaagcgcctcaaaaccgtggaagcacttgcctgatcactgatacgttcaaatgaaattcatttggaaaataatgtgtgcaaaagatgaaaaagacatcgcaactgtatcattggaatgattagagatataacggagtcctataaactttcattcgaacaccaccagtatatctcatttctttcttcttgtgtcatctatttctattctgcttcatttcgacacgatttggtctgtaaaagccatttcctctccttatccaagaactattctgttctttttctcaactatttggtcatcactctatcaaaaaagccagaagagcttgccttctgactttctttatttagatgaatgaacgaaagaaataagaattaatcctctttcttcttgcgagcaagacctagtccgaacaatccagtcatcgcacctgcaagaacagctgcagttgagctttctgtacctgtatttggaagcgcaggtgtttgtggttgcgcaggttgtacgggctgttccggaatttccggagttggtggaacaattggtgttggtggggtatatgaagttggtgttggtggaatttctgttttccttaccactttgttcttatgccatttcactctagcttctggtttcaccggtttagcatttggaacaacttccaaagtcggtggagttggagcagtgggtggaattggagcagtaggcttttcaggttctttacctggatttttaggaactgccacctctgaattaatggcaaaccaataaaccgtcggttgtccctttgcatttgctccatttgctgtaaatacaagatgcccgtctaacatcttaagtcctgcaccaccataatagagatacttcgaatctggattgtcccatccttcgagggccgaagaggtctccccattaaacgctgaaccatgttcaatatattgattatctttcagtgatttcacttctttggtagtaggatcataagacacactagaattcggaattgcgatatacttattatttccaatattcaccgattctatatgttctaatgtttcaaactttttcttcggtgtaaaggttagctctcctgttgtagaattaatagtataaacgccaataatatcatctttaccattcaacgtatagttgtctgtcccaatattgtgaccattcccagtacctgatacattgacgcttgtcgcatcgataactgtttcttcactaactacgaattcacttccattaaatgttgttttctgagctacaattttgattggattttccgcagagatggttacctcggcagatccaaagtcagggatcccattttttacaacaaccgcattgtgttcaatgctcatcgatgacccgtctgcataggggttccaagtcccacgaaccgtattcccattcttatccttagcttccactgtaagagcacgaggtttatctccactttcgacataagaagcacctgtccagtgattcaacgaatttaaagcaactatggcattgtgtttagtaagatcaaaccgacgaccattcccatcataaaattcaacatcgacagcaaccttaactggtttaagtttatcggttgaagcaccgaccgtcaaagtgacggttggatcagcactcacagctgcgattcctttcccgtcatttgaaggaagactgataatttcatatcgataaattacacgtttgattggatttacattcacattttcacgtatactcgatttatttaaattatcataagtaactacaaatttatctccctctctaacaaggatgtattccgtttccctgtttgtccaagggcttgtagaaacgatatccgaactcatcaatttatttgagtcatattgatgtacattgctcgtatttagacgagcttgagcatctttggtaagataggtattaattccatcgatttgatggatcgcattcgtttcacgttggaaggttaaatcttgaacagtttctaaatttttgagatcgctaaacccattatcttccatgtagctgtcgtacattttcttagcaatcttgtactgtttcaataattcttgatattgtgctaatttagcttggtaagaaagaaaatccaattcatactgctctttcttctcgttataagtagcaagttcagatttgtattttgcttccgcttccgcatttctcttttcaattaatgtaatttcttgagattttgcttcatactctgcttttgcttttttgtagttttcgactactgtgttgatttcagctgtttgagttttattatctgcttcggctgctgcgatagacggttggactttttcagcttcttctgtaactgtcacaccttctgcaactgcagctgcttttgctttttcaagttctggtgattctacatatgttgtcgtaactgttttatttccttctgtcacagttgtagacgtcaacttagagcttgctactgtatctgtagcggttacttcagtagccggtcccgtctcctcgtcagcttttacttctgctccgtaagtgtttacagtagccaatccagcgacggccaatgaaacaacaccgactgataatttacgaattgaaaatttttcttgcttcgaacactgttcacgatagcttttcatttccaatattctcctttttagtcaaaaaatctcacggtaggtgcaaaaaaatgctactaccagttaattacattgtatcacaatcaactattttaaaagatgtgttaatataattttttattttactctaaatatatgacacttttatttactaatatttccaatttttacgttgaaaataaatgcactatgtattgaaaaaataatggattttcaaggcatttcctctattttttatttttaaaactttcaccactaaacaaagataggtacaataaatgtttatattccatcggtaaggaacaaacttcagaaacttaaattatgtaactttttcccttatgtattttgcagattcaaaaaaaagacatcgttaaaattcccatttgatagccattaggtttcattttttatctttttccttcaaacaagaaaaccattctcaattatgaggagcttctcagtttatttgaaaaaaatgtcgtatctctatcttcctcccattgtacatccctaaaagttcaccagtggcctctctcaaagctacaaaaaagaccaagatctgaaggaccttggtctaacaactagtgattagtttaagtgccagatgtcttcgttgtactgagcgatcgtacggtcagatgagaagaatcctgctttcgcaatgttaacgatgacttgatccaaccatgcatcacggtcttcgtagtcagccaacatgcgttctttggtgacaatgtagtcttccaagtcaagaagagtcatgaaccagtctttgttgatcaattcattgtgaagacgagtcaagcgttctttgtccccaacagcaagaacggcatcgctgacgatgaagtctaccaatggtttgatggcttcacgttcatagaagtctgctgatttgtatgctgatttagcgtaaagatcgataaccgtttctgaatcttcaccgaagatatagatgttgtcacgtccaaccaattcagcgatttccacgttagctccatccatcgtaccaagtgtcaatgcaccattcaacatgaatttcatgttaccagtacctgaagcttccttcgaagcaagagagatttgctcagaaatatcgctagctgggatcaagtagcttgcagcagttacgttgtagttttctaccataacaacttgcaagtgtggagctaccgctggatcgtttgcaatcacttcagacaagcataggatcaagtggatgatatcttgtgcaatggtgtaggcaggagctgctttaccaccaaagagaacagtgattggacgagcagggatatttccagctttgatgtccaagtatttgtggatcacatacaaagcgttcatttgttgacgtttgtattcgtgaagacgtttgatttgggtatcaaagatagaatttggattgatttccacaccttgatggtctttcaagaaacgagccaatttccgtttgttgtgagacttgatgttttccaattttgctttgactgcatctttatcttcataagaaagaaggtcttccaatttagatgcgtcatggtgccagtcacgtccgaggatatcatccaagtagtgtgacaaggttgggttagcatgcatgagccaacgacggaaagtgataccatttgttttgttgttgaatttttcagggtaaatgtcgtagaaggctttcaactcagaattcttcaagatttctgtgtgaagtgctgctaccccgtttacgctaaatccatagtggatatccatgtgtgccatgtgtacgcgatcattctcatcgatgatttgaacagctggatctttgtattcagcgcgaacacggcggtccaattcttcaatgattggaaccaagtgaggaaccacttcttgcaagaattcaagtggccatttttcaagggcttccgcaaggattgtgtggttagtgtaagccgtcatgctacgaacgatagagatggcttcatccatttcaataccacgttctgtcaaaagacggatcaattcagggatgaccattgatgggtgagtatcgttgatttgtacaacagcatagtcagcaaggtcatgcaagttgcttcctttttcgatggcttcgtcgatgatcaattgtgcaccatttgataccatgaagtattgttggaagatacggagcaattccccttgacggttactatcatctgggtacaagaatagggtcaagttgcgagcgatatctgtcttgtcaaagttaataccatcttcaataatagatgaatcaactgaatccaagtcgaacaagcgcaaacggttcttggtatcaatcttgtaaccagggacatcgatatcataaagggtagaagtcaatgtaaagtgtgcgaatggcacttggtagctacggcttgaacgaacgagccagctttggtcagtcaaccatgcgtttggaatcgtttcttgttggttgtttttaaggacttgttggaacaaaccaaagtggtagttcaaaccaaccccatcccctgtcaaaccaaggcttgagatagagtcgataaagcaggctgccaaacgtcccaaaccaccgttaccaagtgatggttccaattccacttcttcgacttcgatcaagtctttaccagcatcagacaattcttttttgacatcgtcgtaaagacccaagttgatcaagttgttagacaagagtttaccgatcaagaactcagctgagatatagtaaacttttttcttaccagtatttaatttcttttgagcacttgcttgcttcgtgtaatttagcaatgcaatgtacaattcttcatttgaacattcagcaattgttttttgatgatgatcaatcacatatttttgtaaagattccatgttgagagtctccttatatttcaacaatttttttaataggggaaaagattatttttctgctttcgtaacttcttttttcaagtctttgttttcacgacgatagatcgtagtgaaatcaagcaattcttgctcgacagctggagtcaattgatccgctgtcattcgccatgaccagttaccaccgagagtagatgggaagttcatccgagctgagccatctaactcaagcaagtcttgcatagtagcaatcgccatgaagctgacggaagcaaagacggtacgaagcatagcatgcggtacagattcgtactctttccggttggtataacgagcaaggtactcacgagttggatcgtcgatttcattgcggtaccatccaagaactgtgttgttatcatgtgttccagtgtacatcacagagttgtttggtgccaagtgagggctatcgatactttcatcgtcaggattgaaggcaaattgaagaatcttcattcctgggaagccagtacgttcgcgaagctcaatgacttcatctgtcataaagccaaggtcctcagcgatgatgttcaaatcaccgagtttctccttcactgctgcaaagagtttgtagccaggacctttgacccatttaccaggtgcagcagtttcagaaccagctgggatttcccagtatgattcgaaaccacggaagtgatcgatccgaacgatatcgtagattttgaagctttcacgcaagcgttcaatccaccattggtagccatctttgtccattgcttcccagtcatagattgggttcccccaaagttgaccagttgctgagaactcatctggcgggcatcctgcaatgcaagttgccttcccgttttcatctgttttgaagagatgaggattagcccacatgtcgcttgaatcttctgctacatagattggcatatcacccacaatttcaatgtggtggtcgttggcataagctttcaaggccaaccattgttggaagaagaagaattgagtcacacgatggtaagtcaatttatccgccaattcttcacggtagtgcgccaaggcttcaggttgacgtccacgaatggtagcatctggccactctgtccacgcttttaaatcaaagtgttctttaatagccatgtattctgcgaatagctccaaccaagaagcattggcttcgcaaaaagcttggaattctttttgatcacttgattttaagaaattcgcaactgctttttcaagcaggggacgacgttgctcaaaaacttttgcataatcaacctgagaaggatcttgaccaaagtccactccttcaaggtctgcttctgtcaacaaaccttgtttgatcaaaagatcgaaatcaataaaatgagtgtttccagcaaaagctgagaaagattggtatggagaatctccataactagttgtaccaagtggcaaaatttgccagtaacgttgcttggtccgaacgaggaaatcaacaaaatcataagctgattgtccgaatgatccgattccgtattgtccaggaagggaagaaatgtgcatcaaaacaccactttgacgttttttcatgggttaccacctctttttatttctttgaagcctgcgattcggtgcacggtatgagtatcgttgcagagtcgtatccagctctcgagcggctctactctttgttaaaatcgaacaggcgcaactctatttacgcaatttttgcgaaaacgtttgcgtaccatgccattataaactttttccatattttctgcaagggatttcttaaaaactttttaactttttttcagagtgccctcatccctagtgtattctttcctttggctaatgtcaacaaaataatctattttatagaagaaagttcggaattaaaatatttttaaaaaattttttcaaaagcacttgcaaacgttttcttcttgtgatatacttaagtcgttttaggaaaacgtttgtctaaaacggtttctaattattatctttttttattctttaggaggaataaatcatgaaacgtacaattttacgtagtgctgctgtacttggtacagttggttttgccggcttcttgcttgctgcttgtagcaatagctcatcaggttcttctgaggcaagtaaagaaatcaacgtctatgtagacaaaggctacaaatcttatgttgaagaagctgcaaaagcttttgaaaaagaaaatggcgtaaaagttaaaatcaaaactggtgatgctcttggtggattggataacctttctcttgataaccaatctaaaaaagctccagacgttatgatggcaccatatgaccgtgtaggtggtcttggtaacgatggtcaattagctgaagtgacattaaacaaagatagccatacagataaaacaactgaagctcttgtaacaaacggtggtaaagtttacggtgcacctgccgtcatcgaaactttggttctctactataataaagaccttgtaagcgaagctccaaaaacatttggtgaccttgaaaatcttgcaaaagatagcaaatacgactttgctagcgaacctggtaaaacaactgccttcttagctgactggacaaacttctactatgcttacggtttgctttcaggtaatggtggttatgtatttggtaaagatggtacagatgctaaagatcttggattaaacaaccaaggttctatcgacggtatcgaatatgcgaaaacttggtatgctaaatggccaaaaggtttgcaagatacaaaaggtgctgctaacttcatccaaacacaattccaagaaggtaaaacagctgctatcatcgacggtccttggaaagctgcttcattgaaagaagctaaagtaaactacggtgtcgcaactattccaactcttccaaacggaaaacaatattctgcctttggtggtggtaaagcttgggttatcccagcaggtgcgaaaaaccttgatggcgctcaaaaattcattgacttcttgacaagcactgaccaacaaaaagctttgtttgacaagacaaatgaagttcctgccaacacagaagctcgtaaatatgcagttagcaaaaacgatgagttgacaactgccgttgttgatcagttcaagaacgctcaaccaatgccaaacatctctgaaatgagtgctgtttgggatccagctgctactatgcttttcgatgctgtaagtggtaaaaaatctgcaaaagctgctgctgacgatgcagtgaaattgattaaagaaaccatcgaacaaaaattcggtagcaaataagacagtttttaggtttcagtaagaggttggcgacaaggtcccaacctcttatgttcaattttcaagtacaactcactgtcggacttgtcttcttgctctctagcaaggacattataaggagatttgaatgactacagaacaaaaccctaaaaaggctatgtgcctctctttgatcccgggtcttgggcaaatttataacaaacaaaaaaccaaaggctatatttttcttgccgtaaccgtcctctttctcgcctatttcctaggaatcggagctggagaattagcgaaattggttacacttggaacagtccgtggacaagataattctctctttatcttgattcgtggcgccttccacttgatcattaccattgtttacttcctattctatgccttaaatattaaggatgcgggaaccgttgcaaaacgcatcaataatggtattgcagttccaaaaactggaaaagaaatggtgcaagcaatctatgaaaatggcttcccttatcttttgattatcccttcttatatcgctatgacctttgcgattatcttcccagttttggttaccttgatgatcgcctttaccaactatgacttcaaacataccgcaccaacaaccttgttggattggatcgggttccaaaacttcactaacatgtggaccttgagtaccttccgttcagcctttacatctgttcttggctggaccttgatttgggctctcgcagcatcaactcttcaaattgtactcggtattttgacagccattgtggcaaaccaaccattcgtaaaaggaaaacgaatctttggggttatcttcttgcttccttgggctgttccagccttcatcactatccttacattctcaaatatgtttaacgatagtgtcggtgccatcaacgcccaagttatcccattgtttgcaaagatcttcccattcttagatggtgtcttgattccttggaagacagatcctacttggacaaaaatcgctttgattatgatgcaaggttggcttggcttcccttatatctacgtcttgactttggggattcttcaatcgattccaaacgatctttacgaagctgcttatattgatggtgccaatggttggcaaaaattccgcaacatcactttcccaatgattatggctgttgcagcaccaaccttgatcagtcaatacaccttcaactttaacaacttctccatcatttacttgtttaacgatgggggacccggttctgtcggaggaaatgctggatctacagatatcttgatttcttggatctataagttgacaaccaatacctctcctcaatattcaatggctgctgcggtaaccttgattatctctgtaatcgtgatctcaatctctatgattgccttcaagaaactacatgcatttgatatggaggatgtataaaatgaaaaattcagttcaatttaaacgccgcctcaatcatttcttgacttacctgtacatggtggttctttcaatcgttatcatttatccattgttgattacggttttatcagccttcaaatcagggaatgtcagtgcctttacacttgatttaagtggcaatcttaattttgataacttctcaaaacttttctctgaaactccttatgggacttggtatatgaataccttggttatcgccattatcaccatgattgtgcaaacaagcattgtcaccttcgcaggttacgcctatagtcgttacaacttcttagcgcgtaagcaaagtttggtcttcttcttgattattcaaatggttccaaccatggcagccctcacagccttcttcgttatggctttgatgctgaatgccttgaaccaaccttggttcttgatcttcctttatgttggtggtggtattccgatgaacgcttggttgatgaagggatacttcgataccgttccaatctcacttgatgaatctgcgaaattggatggtgcagggcacttccgtcgcttctggcaaattgtccttccacttgttcgtccaatgatcgccgttcaagcactctgggctttcatgggtcctttcggagactatatcttgtctaaattcttgcttcgtgatgaagtaaactatactgtagccgttggtcttcaaacctttatcagtgaccaaaaagatcaaaagatcgccttctttgcagccggtgccattttgatcgcagttccaatctgtattctattcttcttccttcaaaagaactttgtttcaggcttgacagctggtggggataaaggataaaatagaaccttatttcaaacacattttatttttaagttaagggtagtatggtggatactttactacccttcgttaagaacaaaatcaatcaaagagtttcctctttgcatctctgattctcttatgtttagaaaggtcatctcatgccctatccttttaattatttcgcaagtatcttcaatttccgctcttcttttgcaaaccgaaaaaagctgagttggttccaaatgatttttacttctttctttctgatttctgtcacactattaccagtggctcttcaaaatgctcaactcaaaacctatcccttaacaacttttgtcagcgatgtgtttgatcccttatcaaatgacgtcatgaaagatatccaagaacacgtcgtgatcaaagaccaagagctcacctatacaggaactagccctgtacacaagacttcaaaaggacaggttgtcttgggccaagaagcaaaggcgagtgaaggcaaggagttaaccctccattttgatcgaaaacagttgaccatctcaaaagagaataaagaactcgctacagtctcataccaggctattaatcaagagagccttcgggataaaaaaagcttcactcaagctatctctagcgattggttccgcgacaatcgactccctgtcagtctctttctcgtgattttctctggcttcttgtcgacagtcaattatttgattctcatcctaggggcctctttcttcctctacttgacacgaaaatctcgactcttttcactacaaactttcaaggaatgtttcaactgtattctgaattgcttgggactccctattttactgagtgtcttcatcagtttactattccatcaagtatttactacgacgatcatgatccaaaatgtcttatttgtactctatcttgctatggtattttataagacccacttccgtgatccagactatcaccgctaggaggttttctcatgcgtgttaccatcaaagatgtggcgaaactcgctggcgtcgcgccttcaactgtcacgcgcgtcatccaaaacaaatccacgattagtgatgaaacaaaaaaacgtgtccgtgaggccatggtcgaattggactaccatcccaatcttaatgctcgcagccttgtcagccaatctagtcaagtcattgctttggtcctaccaatcgacagtgacgtcttctaccagaatcctttcttcccaactgttttaagagggattacccagatcgcgtcagacaatgattatgccatccaaatctgtacggggcaaaatgaagaacggcggctcgacaacctcaaacaactcatctacggaaatcgtgtagatggtttgattttcctttattccaacccgaatgatcccctcgttgaatttgcgatcaaagacaagttccccttcctcattctcggaaaggcagcttcaccttttgtatcgctagtggataatgataatatcaaggctgcatttgatgcgacggattatttcattcaacaaaactaccgaaaaattgcttttatcgggggaaacaaagaactgttcgtatctcaagaccgctacgaaggttataaagaagccctccaaaaagcagggattcctctcgatgaaaaactggttcatttctcatttggttttatgttggaagacaattcttatcaaatgatggagagccttcccctagcagagttagatgccatcatgacaaccgatattctcgttgctgaaggggtgcgccaatacctattagaacaccagctgacaatcccgattatttcctttgattcgattaagccacgactcgatattgaagcctatattgacatcaatgcagtggaactcggacgtgagtctgttcggacaattctacaaattatcaaggatcacaaagaaggaaaaaccgtttgctaccgtcaattgattgaccataccattacgaaactctaggagtctttatgtctacatttactgcttatttagatgaccaagacctcattcgtatccaaaagggagaggagcatatccttcctttttatttgaaaacgaaccaaggtcatcttgccttaatccctgtcaaaacgtcaagtgcagcgactgacacaggagactatttcttaagccctattccacttgaactcggagaagagtacaccatctacgatgctactggaaattcttctatactccactatcgaaacatcgttcgcaaacccattttcgatcaaaccttcacctatactggagaagatttaggaagtttttacacaccaaatcagacgcaatttaaattctgggcaccgatttcgcaagatgtgagtctccatatcgaagatcagatctatccgatgacacgtacagaaaacggtgtctggaaactcttgctcaaaggggattgggaaggagctgcctaccactatgaatttcgtgtcaatggcctagaacgtcggattcacgatccctatgctctatcctctttggccaactctggagacagcttggtcatcgaccggaagaagattacacgtcctatcacacgtgctgctcgtcaattagacccgacagaagcaatcatctacgagatgagcgttcgggacttctctgtccaaaaagaggccggctttaaacaccctggtaagtttaaagggttgacagaatcgcctcaactcaatggtcagatccttggatttgattaccttcaaaaacttggcattacccatgtacagttacttccagtttacgatttcggtagtgtcgatgaagaggatcaatggaaagcctacaactggggctatgatcctgttcaatacaatgttccagaaggaagctatgcgagtgatcctaacgatccttatgcgcgaatcctagagctccaagacaccattgacacctatcaccgggctaatctgagtgtcatcatggatgtagtctacaatcacgtctaccaggcagatgaatacgcttttgaacagatcgttcctggttatttctaccgctataatgcagagggagagcggaccaatggaaccttctgtggaaatgacgtagcaagtgaacgctccatggtgagacagtatatcaagcaatccctcaaacaatgggtttccctctacggctttgatggttttcgctttgatttgatgggaatcctagacattcaaaccatgacagagattgcagaagaactccgtgaaatctatcctaacatctatctctatggggaagggtggaagatggataccggcctctctgaagaccagctcgctcaccagtataacgcgaaacgattaccagcctttggctttttcagtgataacttccgggatacgatcaagagaacacttgtagccggtcaccgtcgtgagagtcaacatcccgcaaatgattttgctaatatcctgactgcaaatgtcggaaagctagggcctgctcatttcacccaacctcaacaagccattcaatacgtcgaatgccatgataatgcaactatttttgattatttccaacttgaaagggaagaaattcgcctagaggagcgaaaagctctctcacgcctcgctcttcatctggtattattatcccaaggagtaccttttatccatgctggccaagaacgttaccgcacgaaagggctcgaagacaacacctacaacttgccagatagtctcaaccaattggactggacatccctttcaaaatgccaagaagaaatttcttttcttgaagaattgattgcttatcgaaaatcacagccactccttcgtttgaaaaaagggcaagagattcgagactactgtgatgtcaaatggttgtctgaccatcattttatctacacgattgaaaaaaatcgtgaaaaaataacgattcttgtcaatatcggtgatcaagaacagacctatcaacatccgagcgatagtcagctgctatttgcttatcctcatgccaacctccaagcgcctattcctaaaggaaagaaactttctattcctgcccatagttggctccttctccgcgaaactaaatcaacaaaataagaggctgggacaaaagtcctagcctctcaattatttttggattgtcgagcaagacgcagtggttgagtgggctctactacgctgatttcatcagcttttacagccctactcaactgtgcggaggtgggatgacgaaatcgaattctaacgaattaccgatttctgtcccactctcttatttttattcttctgtttccacaaagcgtccgatgatatgaacattttctgaaatggtgataaaagcctgaggatcagcttttttcataatatatttgaattcattaaactctgcacgcgtaataactgtcagcagaaccgctttttcctgatggttataggttccttctgcattgtggataatggttgctccacgatgcaattttttatggatcttttcaataatggcatctggctggctcgttacgatcattgcctgcatccgtttttgcttggtaaagacagcatccgttactcgactcgatacgaagatggtaatcatagagtaaagagcatacttccaaccaaaggtcagaccagcgatcaacataatggtcccattgaccaaaaaggagatactgccgacattctttcctgtccgttttcgaatcgtcaaactgacaatatccgttcctccactggaaatgttgttccgaagagcaaaaccaatccctgttcccatgacaaccccaccaaatagggcattcatgatcggatcgttggtcaacgtaatcactggcacgaactgaataaagagggaactcatcgaaaccgtaataaaggtaaagatggtaaatttatggccaatttgataccaagccacaatcatcaaagggatattgatggcataaaaggtcaaggaaactggaatcgtaaagccaataaagcgttggctcagaacagacaaaatctgagctagacctgttgcaccgctggagtatacatgtcctggttgaaagaagaagttgacggcaatcgctgatagaaaaccatacagcaaggaagctgacactttttcatcgtatttctcacgggagatgctcttcagcacgcgcaataatttaatgttataagctagtcgccgcacatgatagcgaaatagcttatgaaagcgaatttttttcattttcaatccatcgattagaagaaaaggaaaatcttagagcaactgattcctagactctcccttttctctcttgtcctattcttgctctgctacttctacttgaagatttaactcatccaattgcttttcagaaacgacagaaggagcttgtgtcattggatctgtcgccttgttattcttaggaaaggcaatgacttcccgaatattatcttcacctgcaagaagcatcacgaagcggtccaaaccaatcgccaatcctccatgtggtgggaaaccataatccattgcttccaacaagaaaccaaattgttcattggcagcttcttttgtaaatccaagtgccttaaacatccgttcttgcaagtctttatgattaatccgtaggcttcctccacctaattcatagccatttaagacgatatcataggcaatcgctcgaacttttgaaagatcgccttccaattcatgctctgtttcagcttgtgggagtgtaaatggatggtgagcagacatataacggccttcctcttcagaccactcaaacattggccaatccactacccaaaggaagttgtattgattgttgtcaatcaagtcaagctctttcgcaagacgaacacgcaaagcaccaagcgttgcattggctacttcaagagtatctgctacaaagagaactagatctttgtcttctaactgtaaagcagctgtcaagtcacttgtcaagtctgtcaagaacttcgcaacaggaccgttcaaagtaccctcagcatatttcacccaagcaagaccttttgcaccgtattgcttcgcaacttctgtcaatttatcgatgtctttacgagagtaatgatccgctgcacctttgacaacaatcgccttaactgctggagcttctgagaagactttgaagtctacacccttgacaagttctgtcaagtcttggagcaacatttcaaaacgtgtatctggtttatctgaaccgtacaaggccatagcatcatcataattcatccgtgggaatgggagtgttacttcaattcccttggtttctttcatgacacgtgcaattaagccttctgtgatatcctggatttcttgatcactcaagaaagaagtttccaagtcgacctgtgtaaactcaggttgacggtctccccgtaaatcctcatcacggaaacacttcacgatttgataatagcgatcaaatccagcattcatcaacaattgttttgtaatttgaggactttgaggaagggcatagaaatgacccttattgacacgggaaggaaccaaatagtcacgcgctccttctggagttgacttagaaagaaagggtgtttccacatcaataaattctaattcatccaagtaattgcggattgaatgggttacttttgcacggagtttgagattttccaacatctcaggacgacgaaggtctaagtagcggtaacgaagacgggtatcatcattggcttcaattccgtccttgatttcaaatggtgttgttttggcagtattgagaaccgtaatagcttctaccttgagttctactgctcctgttggcaagttgggattagcttgttcacgagcttccacaagacctgtcacttctacaacatattcactacggatactttcagctgtagccatcacttctgcactaactgtttctggattgatcaccaattgcatgattccttcgcggtcgcgtagatcgataaagatcaaaccacccaagtcacgacgacggctaacccatcctttcaaggtaatacgagttccaatgtgttcttcacgaacacgtccagcatacattgaacgtttcatttctaattaatctccaaactaatattcttccttctattttaccataaagaccagcagaaagtggcctttagctcaactttttcagtcaccaacttctttaattatcgtggctctcttctttctttttgggatcatcgtagagagtgggtgctagcaccttcattaaagtcgccgtcccaaatcgcaagacagctgctgctagtccaaaaataggggataggtagcggaaaaagaaatctcccctaagtacataggtcatgccacccacaataaaaaagatcacaattccctgaacgattgcgtaaaaccaaatttttttcacactattctccttttcacaaaccagctgacttatccactgttttttatcacttatccacaaaaatgtggataactttcaccttttgccccctcaaaagaggaagcgtcatcagcaccaggacttgttttcatccatttacaagcaagtttcccacagcctgtggataactctcttgcttacttgtgactttctcgtcactttgctcacaaatcaaggagccaggattcgatcctgccccctttgatcaagcattatttaaattcgtctggtgtccctttatattgggcccagtctttactgaagaagcgatcatttagatggtaagttggtgctttttcagcctttgtgacaaagggattgaccgctttatcaaaggctagccaaccattccatcccatatgaatcgtgtcttccataaaataggactgatcaccatctttagaaaagtctgcaatattagtaaaaccttgacttttcaattggtaacgaatcttttgaacagcctgttcatacatgtcttggctcaagcctgtgtatttcatccatttggcattaactggaggaatgacaaagataacattggtccgagatttagcaaactggtctagaaccaattgcaagtcattgtactctggagattgaacataggattcgtttttttggaaaccttttagtttcttcaacttcatttttaaacgggtattgtaaaaatgattgctgatcccaaggtcgttgttattggttttgacttttgcttcagccgttgcaatttcttccaatttctcatatgagaattgatctggtaaatcttgtagacgttttttgactttcttatcgtaattcccatttgtacgcgttgcaagattactaaacaaagcatcttcgcgttgaacaaggtgggaaacaaactggttcaaagactgatcaaatccggaaattttctttccttgagaaattttcgttacaacactttgaaaggcgacatttggatactgttgtaacagacgctttgcagcatactgggatgcagcatcctgttggtgatttgcaataaagctattcaactgatcgctattaaagaattgttgaaaggcagaggaatcatagcccttcttggtgaaccattgcggagaaactacataaacagctgtattgtccttgagttctggcaaaatctgttgcatcccaaaatactggttcaaagaagccgcaccacgttctcctaaaaagtagggtctgtaattgcggtcatatttttcagctaaaaccgctggatgcaccacatcaaaacgcaaccattcacttgagccaaaataagggacaaagcgatgctgtggatccgaaagtgcttcttgtttctttgtacgactcttgaagccttctgcattcagactaaccgcagcttttttctcttcagtatagttgtgcttatgattgattggataaaagaataataaagctgctaccatgaggagcgcgcaaaatacgggccctaaaatcagccacaaacgcttaagcattctgaagctccgttacaccttctacgatcttgttcgcagtattccaatcatcgcgtccaaattcagatacaggaacacggatgccaaagcgattttccaattccacaatcaattcgactgttcccatactatcaaggacacccgcatcaaagagatcctcatccatcatgtctgagacatcttccataaacaattcgtcaataatttcaattacttgtgattttacatccatttttctattctccttttatttcaattttggaaaccattgttgatccaagaatcctgagaaaatcaggaaggacagcatcactgtgttaaaggtgataaagatccctaaagctttggtccaacgattgtccggtataggatccaatccttttgcttttctttctttattgatggtctttttcttgcgaatccaagcatcattgatgaccagtccaagcccatggaagagcccataagcgatgtagtaccaagtcaccccgtgccagaaacccatgaccaacatattgataatgtaggcaacatttgaggtggtaattcggctcttgaatactttattgcgcatcaataccatcacgagacgcataaagacaaaatcacggaaccagaaagacaaactcatatgccaacgattccagaattcctttaagtcacgtgatttaaagggacgatcaaagttgattggacttttaatccccatcagattggaagctgctaaagcaaacatcgaatagcccgcgaagtcaaagaagaggtcaaagccataaacatacatgactcccagcgttccgatattgaagaatccaccttgagacaaggcataggtctgcacatgacctaacaataagtggccaaaaatatgagctaggataaatttataaaggaagccatacatgatatacttaacagcttgctccaacatgtccaataattcttcacgctcaggaatggctttataatcctcattaaaacgcttgaaacgatcaatcggcccacttgagaaggtcggcataaagagcataaagcgtaagaattcccagagtgtgaattctttcaagacaccatctcgcatttcgatgatcattccgacagcccggaaagttaaatacgaaatccctaaaaatccaaacaaagattggtgcccattcttgatcgctggctccaccttaacaaagatcaggggcaagacagacaagaaggaatgaagatagaaaatccacttattgtccgctttctgacgataaatcttgtaggaatacacaatcaagatttgccagactacgtaaaagagcagggcataaatttgcttaagattcgaacctgtcagcatcaaaatgataaagatcagactcacaagtccttcatataccggaaatctctttttgaaaaagaggcccacaaagatcggcaaaaaagctagaatgaggtagataaaatagatcggtgttccatagtgttctaaatgagggagctgtttcaaaaactcgatcatcggttgttaacctcgctaatcaaccctttgatgtcgattttcccgtttggtgttaatggcaggctgtcacggtaaaggaattttgaaggcatcatataagacatcatgatgttttctaaatcttccttaatggctttcgtgatatcaatttcgcgctcaaattgttctttgacgccctcttttaagatgacataggccaagagattttggaccttgtgatctttattataacgcggtactgcgactgctgagtcaatatacttcgatttattcaagttttgagagacatcctctagctcgatacgataaccgttaaacttaatttggaagtccatccgtccaccatagagaaggagaccttcatccgtcatggttccgacatctcctgtatggtaggctggaagaccttcaaattcgaagaaggcttctgctgttttctctggattattcatataaccttttgaaacagctggtccagatacgatgatttccccttgctctccatttggcaatttgttcccttcctcatcaatgataaaggttggagaatcttctttggtatagccgattggcaagcgtttaagagtcgctagcatctcatctgtgatagccactgccgacaaagcaacggttgcttccgttggcccataagcattgatgatgcgtgcatttgggaaacgctcgcgcaatttctgagccgttttcacggtcaactcttctccatcaaagtagaaatgggtgatgcctggcatcttttcagcattgaaatcttcagacagcatggccatatctgcaaaagatggcgtcgaagtccagatcgcaatcggaagagaaaaaatggtcgcaaagagttgtttgaagtcttgagtgatggctgatggaagagcaaaaagggttccaccaagagccaaggttggtgcccaatacatgacagacaagtcaaaagaatagggcggttgcgccaacatttgcggacgctctggcgtcgcaaattccttgtctgtgatcatccagttagtaaagctgagcaagttatcgtgcgaaatttgcaccccttttggctttccggttgtccctgaggtaaagatgatgtagtagttatcatcccctttgactggatgttgcaagtcataggcatgctgagccgcataagcttcacgcacttgctccaaagacatgattggagcagctgggttttccaatggaaattcattgatggcaataatcaagcttggctctgctacttcaacaatggcagacacgcgctccaaggcagagtggctatcaattgggatataggcatggccagattttgtcaaggccacaaaggttgctaacatttcatattcttgtccaccaaagaccactacaggtgacttttcaggaagtcccatttggtcaatatgggcagccaagctatctgaatcagccttcaattggccataggtatgttcctcaccaaggacattgtaaaccggatagtctggttgtagttgcgcataacgttcaattgtctcgatcatatcagtaattggttggtttgacacggctaggagtctccttttctaaaattcgttgtagataaagccaccctgaccttgaccaaggtaactaaagaaataaagtagggctaggaaaatggcgaaatacaagaccgtctgcccgataaatttataaagtgttttatgtttcataagtttcactcttcattttgattgttactcactattttaccattttttataccaagtaagcaattttaaacatagtgagaatgtggtagaaaacgttatcatttcagatcattcaagccgtctaacaaaagtatttttctttaatcagttttctggttgaaatcctattctatttcacagtcccctgatgaatcaactctagacacttgtccagatccacgtctctttcaaaatgggtaggtgtccaaggaatctctatatctggtagaacaccctgatccgtcattcctttaccttgatccacgcttaaacagcgagaagtgggaaacattaaacaaaaattatcataatcaaccctacaacaattagagtagtctagaattccgagagttggtcgacccaccaccgttaccttcttaaactgcttcatcatatggacgaaattatctccagaagaagcgcagtagatatctgacaagataaagatctgttcaggatagtgacttcctctgacctctgggaaaaattcctcgctttcttccttatacggtacatagccttctccccgatggcggagcaaatcctctttcatatcttcaagcagcttaactgtttcaggactaatttcttcctgttgcatccagttctcaaagtctttcaagcgcaggtcaacatttcgctccgtgtagagaatttccatgccatcatcatcccaatcaatgccttcatagccctgatccttctctaaacctagatgcaatagagggatatataaagaatctgtccctcctccgttctgtcggacatcaatgagaagaaacttgatttccgtcatcatcggtaaacactcttgatatacccgactaatagctctctcatccataaagttatccagacgaagataaagaatctcatcgtctaatcgtttccaaaaaatatgatcctggatcggttctcgactgggtactacttcaatggacttttctatcccttctcgaagcagggtgacactagttgactgagagaccaaatctgcccattctctataatgtctttcggggttcttgctaataaaatagtctttatgaagagaagctatctgatccaagtcacttccatccagagctaggatctgatctcctacttgaagaccagtatcttcattagcttcctcaacatacaatttctgtccatttattctcaaaagaaaccctttttgactggcttttttatctcgaaaggaaacatgcccgatcaccccaaaactagctaggtaagtcttcacttgatagataaaggcatcatctgtcatatcatctgtaatgttttctcgaaaaggctctggatcgcatccttttcgatccttgatggtagatgaatcatgggtcataatagagacgacatcttcaaaaatagcagtctttttcataaaagattccttccattttttagaaacagtataccactttttcttaaaaagttcttaaaaccctaaaaaactatcctaaagtaggatagccgttatagattctttcttttcttcgctttctttgtcagagcgacatcacaattttcaatcttgctaatcaatagattggcaagggcaaaatcatcgatgttcgatttcatatttacctcatagttcaaggtcagttgttctccagcttgggccgttgtgacagaaataaagtcaatttctgaacaacttttatctaacaactggctgatttgttctgcaacagaatcttgttttaagacggtaatggtcaaatgacggcgccgttgatgatctgccttactctgtttgttctctaatactagccacacccctagtaaagagagagttgataaaatggccaataaaagatagcccgaacctgcagccaatcctataatcatagctaagaaaatggcaatcaactctctcgaaccactcgtagccgaacgaaaacggatcaaactaaaggtccctgccactgcaatcgaggttcccaaacttccattgaccaaaaagatcactaaggtcatcatacaaggaagcaaggtcaaactaatgacaaactctcgagtgtaaagtgtccggtatttataggtccaagatagggccagccctagaaagaggctgaccaaaagggccagcagtaagcgcaagggatccaccgttgctgtggcattattaaaaatagaatcaaatagattagacataggcagcacctaccgtttcttgaactggtcttgggacataatccaagccttgtgatttatgataagcacagctatattttgaaaatttctgtttcaccaaaccatacttctctaaaatatcctttagccatttaggttcttggccaggagccttaatttccatgatcacgaagtcatcctctagtagaggttctcctttcttcccatcaaaaaggctaacagcctggtctcgaaagactaagttttgatcgattgtcacgcgaatcttctgataaggataaccctgaatggatttcttttctttgagagacagacgatcatagtaaatgaacatccgtggttccaatcgatgaccataacgtttgcgcaatctctgaatctcttgcactaagtctggatcttgtatctgatgatctactgtcccatctgtcatcaagttgataatggcttgcgaagtagcaactagacggaatttatggccaattccttcttcatcttttgacttcacctctagaaatactggactgtctgcttgaggtttttctatataagtccgcatccgaattttttcacggcggtgttgtttggcaagagcatcttgaatgacatcaaaattttccgtatcaaaataaatgtttgaaatggttgaggttggataatcatcttctacgacgtattcttttaagtctttgatcaagtccttcacgtcatcttttgcgacgatatattttgtttcgattcgtttgaaacttgtctcaattgtttttttcatgtttcttctcctttaagggggtctatgtttctaaacttcagtaagtatgaatacgacttacatgctttctagtttaatgggactttcttaactggtcattaagccaaacttaaagaaaactaaagttaaggttcctttcagaaaaactttaggaaactttcagctagcaactttagactaggagcatatcaattgaacgagaggaaaagctcatgaaatcaaacaaatggaaatttttattaacgggggtcgcaaccctcaccttactgacagcttgtacccaagcatcatcacaatcagctacaaaaagcaatactgcacaaacaaccgctacttctacttcaaaaaataaaacaaacaattccaactattttacagataaggacaaggacagctcttatgatgaaagcaaagcctctactgtaaaactgtctggatcttctgcaagtgtatcaggtgacggcgtagctgtatctggatcaactgtgaccatctcaaaggctggaacctatgtcatctctggtgaatccgatggggttcaaatcaaggtcgaagcaggtgactcagatgatgttcacatcgtcttgaaaggcgttaccatgaccaacaccaacgcgccaatttctgctacgaaagccgggcatgtctacctgactctagcggatggcacgaccaataccttgtctgattcaagctccaacactgatgaagatgccgatgcggtgatcttctctaagggcgacctcaccatcaatggttcaggtacgctcaacattgacgccaagaagaacaacgggatcaaggccaatgacactctccatatcacaggtggaacctataagatcacggctgtaggagatgccgtcaacgtcaatgacgaactcaatatcactggtacgaccatgaccatcgatgcaaatgaagatgccgtcaaggtggataatgatgaagatacttcggtcggaaccatgtatctttcagataacaaaatgaccatcaccgcaggagacgacgggatccatgcttctggtgatctgatcatcgatagcggaacctatgaggtaacagagtctgtcgaaggtctcgaaggaaaatcgatcaccatcaacggtggagatatcaccatctatgcaaccgatgacggtgtcaatgctgccaatgccaatgctaaccaagatgaaattttcttcaccatgaatggtggaaccctcaacgttgaagttggccaaggcgataccgatccaattgattcgaatggaaatatcaccgttaccggaggaaccattaaattaacgggtcaatctggattcgactttgatggtactgctacctacactggcggagacatctatatcaacggtgaaaaacaaacggaaattgtcaactccatgcctggaggcggtggggctccaggcggtggacctggaagtgggcatccataataacaaataaaggcaggatttcttcctgacctttttttgttaccctttttatgatagaatagaaaatcaatcagcttatcgaaaggaacatgatgaaaaaacaaacactccctcttttcttcacactcttgctgtctcttctttttctctcagcctgtgtgccggaccttaagatcaattttaaaaaagaacccactactagcacctcaaaaaagaaaacctttaaaaaaagtagctcgagtcgttcaactagttcaaacagctcaagcgactcctctagctcgccttcaaccactacgcagtcctcttctaacatcgtcacaaccgaaggactccctaaaaatgctcaagaagctccaaaagataagatttatgcgacagggaacctaaaagtggcctactctagaaatggcgataatatttttgcccagacgccggattatgaaggatataccactgcccttgtccaaaaaatacttgggaatccagagaaacaaataacagaccctacttatattgccgaatcttttgaaaataccgaattagaaaatattaaaggactctaccacgaggggaaaatcacaggagaacaagctcacgcctttttaatggaagccgttgatctcaaacaagcttctaaatttggagtagactataccatttacacctataaaaacaacaccatccaactggtctttgaaaacgaccaacttctctatattacaccaaatcctgatgttgtcttctttaaataataagagagtgggacagaaatcggtaattcgttagaattcgatttcgtcgtcccacctccgcacagttgagtagggctgtaaaagctgatgaaatcagcgtagtagagcccactcaaccactgcgtcttgctcgacaatccaaaaacaattgagaggctaggacttttgtcccagcctcttgtttcacatgaaacaaaaaactcccaacacattctgttgggagttcctgaagattagtcctcttcatatttttttggattatagaaccacattcctagccctgcaaaaagaacaatagtcattagaaggaaggccacttgatttccaatttctcctgtcatcgaaatcgtttgacgaagaccagaaacggtatagctcattggcaagaatggatgaatggcttggaaaaagccatttgtcaaagccagaggataagttcctgcactagaagccaattgcaagagcaagaggatcaaggaaaggaaagcaccgatctttctttgccatgttgtcaaagcagtcacgatagacatgaaggccacactaccaatcacacaaaggaagagagtagccatctcatgattagctgataaaccaatcaagtgaacggcaccatagaccaagactcctgcaatcaccgcaattgttccgttgacctcaaagcgagatttaaaccatgcccagcgactttcaggatgacgaccggatggcaattttgcaaagatcatattggttgacaaggcacaaacaaagagtgctaccgagatcatataaggagccattccgacaccattcaccgggacattgtcacggtctgttttagacaaagtgacaggatctgctaaggttttagcgttttctttttcagttgtagccacattcaattgtcccttagcatcgtttaatccttgactcaaggtttggcttcctgttgctaattcacctaaaccatttgtcaatgtttggccacctgctgctaatttgctggacccatccgagatttgatttgcaccgtcggctagtttatcagcaccagtcaccaattgacctgatttttctgtcaactgattgacaccagtgacaagtttgttgacaccacctgccaactctggagtcttgctgtttaattgccctacaccttcagctaattttccagcgccggcaaccaattcacccgacttacctgttaattgggttgctcctgaagccagttgattcatgcctgatgtcaaggcaggcatcttcccatttaactcacctagaccagaagctaattgattgcttcctgcaagtaattctgatgatttactatctagttggccaacacctgctgctaactgactagccccatttgttaaagtactgctattggtctgaagttgggttgctccattagcgattttatcgacacctgctgtataagcgccgatcccttgactgatggtttgactagctggcaacaattgtccactaactgcggattggatcttagacaagccacttgacaagtctgtcaaggtagaagaagctgtcggtaaaacttgattggctgccgtttgcagttgtgtcaagctattccctgtattcaaactaccttggatcgtttgaatcgtagtcaagattccttgagccgccgtttcactcgagcttgggctcgatgagatcgccgcattgatttccgcttgttggtcagctgtcattgcttgataggctgctgtcccttgcacacttgcaagggcatttgcacgatccgcttgggctgaagcaaggattgattgagctgaattcgcaatactcgtcaatccagacgaaagttgactggtatctactgtagcattttgaatcgctgcatttaattggtttaaaccagctgccaattgatcaatctgagcggattgacttgtagaagcttgtagctggcttgataatgtttgaatacctgattctaattgagaaaccccatttcgaagagtagcggattgactacttaattgacccgctccttctgataatgatgcaaccccattggtataggttgctaaaccatttgaaaagttagataggcctgaattcaattgacgcacgccattggtataattcccaagaccatcattgagggtccccataccactggttaattgaccaactcctgaagccaactgaggggtttgactcgccatttgattgagaccatttcctaatcgatccactccggtagcgtaggccatcaagcctgtattaaaagtaccaaacccattatttaattgattgacgccagataccaagtttggaagttgaccagccatttgattgagaccatttcctaattgaccaacaccatctgtataagccgctagacctgtacgaagagtagttgcaccatctgaaaatgctaagcttgaacgagccaatgtattcaaattagtagatagtgtttgaccaccatcttccaatttacttgcaccatctgctaatttagcacttccatctgccgctgtccccataccagttttaagcgatcccattttggaaaataaagctgttgtataagtattggtcactttttcagccactgactgcttcatttttgtcatcgcagtgtcgctcattttccctgcgataaaactatgaccactggacgtttggtaatcaatggtcatctgttccggatgattggttaaaatggagctagctttttttgaaagatcctcaggcagggttacaatcatataataatcgccattttttagaccatctttcgcagctttctcatctacaaaatgaaaatcaagtgagtcattgtccttcaaattggacaccatgtcttttccaatttccatcttttgtccattatatgtagcagattgatccttattgacaaccgctacaggaagatccgaaacttggccgtatggatcccacatggaagatagaaaaataatattataaagagctggaatcaaagcaactccaatcatgacaatgataaatgttggctttttaagaatagccttccattctttcatcatattttttgtctcctttttatacacattgtctaaatttctgatataatagattatacagtttctagaaattttcacaagtaggaaatcttgttttttagacactgtgtataattttgtgcaaaaaggattaacagatgactgagagcaataaacgattaaaaacaaaaagaaatattgaggaggcgatggttcgactactcgaaaaggaatcatttgatcaaatcacaacggttgagttagcacaagaatccggcattagtcgctctagcttttatacccactatcgagacaagtatgacatgatcgagcgctaccaacaagcactctttcacaagcttgaatatatctttgataaacaccaagatgacaagcgccaagcgattacagaagtgttcgaatttctaaccaaggaaccactctttgcggttcttctgacagagaatggaaccaaggagatccaaaccttcttacgacataaattgcagattcttctggttgatagtttgcaagagcgctatagtcataaatcattaacagatattgaaagagtctacagttctgtctatctgaccaatgccttcttcggagtctgtcaaatgtgggtttcgcgcggaaaaaaagaaagccctcaacaaatggctgagtttttaatgaaaatgctacggtaacagtcccttctgatcgatctagatcaggagtttttttattagcaggtttaggttttaagaagacaaaaacctgtctcatttaatgaaacaggtttagaaaacttgtaagtgagcaaaaaggggagcaaacccaaaaatcaaccctttaagacaaaacaaaaagcccactgttgtaggctttctgtaaggtatatcttaaaattaaagcatcttgttatagaattcaacgacaagtgcttcgttgatttctgggttgatttcatcacgttctggaaggcgagtcaatgaaccttcaagtttgtcagcatcgaatgatacgaatgctggacgtccaactgtagcttcaacagcttcaaggatagctggaactttagctgatttttcgcgaactgagatcacttgacctggagttacacggtatgaagggatatcaacgcgttttccgtcaacaaggatgtgaccgtggttaacgaattgacgagcttgacgacgagtagtcgcaagtccaagacggtaaacaacgttatccaaacgacgttccaaaagaagcatgaagttgaaaccgacagttccttctttaactttagtagcttgtacgaacaagttacggaattgtttttcaccaagtccgtaagagaaacgaagtttttgtttttcagctaattgcaaaccgtattctgacaattttgaacggttgtttggtccgtgttgacctggtacgtagttacgacgtgccaattctttacctgtacctgtaagtgacaagccaagacggcgagattgtttccaagatggtcctgtataacgtgacatttaaaatgtcctcctataaaaataatttttgtaggaaataacgttttagacaaacctgattcgttcagaaagccttcgcccaaacagcaaaggttacttttctagctgacttcctgttgacgagcttcattttgtcctgctgtcatttcgcacaaattctattctatcacggaatagaaactttgtaaagtccttcaaaacaatttcaatgaaattcagacaataattctataattcgttttttatattgcaattgttgccagtccctatccgttgctggatcccattttaaaggaagatctgcaataatttcaccaggattatgattcaagatatagatccggtcactcaatgtcaaagcttcttcgatactatgagtgatcactagagtggtgagaccaagacgttccttactttctagataccagtgataaagatcctgccttgtcaattcatctaaggcactaaaagcttcatctaataggaagacagaatgacccagaagataggttctcaatagcgccacccgttgccgcatccccccactcagcgcattgggataaaggttggcgatacttcccaatttaaattcatctaacaattttagagctgtagatgtcgcctcttccttaggaatcttttttaattgaaggggaagaataacatttcccaataccgtcttgtgttctaacaaaagatccttttgtagcatatagctgactttcccaaaggagatcggggcattatctacttctatagcacccttttgtaagggaaggatcccagcaattaaattaaacaaggttgatttccctaccccactcggacccagaatagagacaatttctcctttttgcacttctagtgatacattatttaaaactgctttatctccaaaagagaaacttacatcttttacggttaaaatatcagtcacctaccaattcgtttgtaaaacctttgtcttctaagtcatttgaaaccaatccttgctcttttgcccaagcataaaaagcattccaacgtttggagtcaaactgcccccatttatccttgtctgaagcatattgactggaaagatatttttgagaagctaaaacaaaatcacgctgattagctaaggcaggggcctgtttgatcaagatatccgctgcttcttctggatgctctatagcatattggtagcctttttttaccgcttgaatgaatttttttgcttcctctttatgagacttcaaatagtcattgttagcaataataacaggcgaatagtagtcaaatgcaggaacaaaatctttcatatagaagaaattggtcttcattcccttttgctcagccaaaattccatcccaaccatgataaatccaagcagcatcaaagaccttattttcaatcggagtaatggaatttgaatcactatttggaaccaattttacttgattaaaatcagccccctcttttttcatcatcgatttgatcatttccaactcaatcggatcattccaggtaccatacttcttaccaaccaaatcttttggacttgtgatcgctgcatcttttcttgaaataatccctgacgtattgtgttcgacgatagctgcaacagcggtaatacccgcacctttatccaatttcttggccatagaatcttggaaataaataccaaatggagctttcccattgataatcaaatcagaactactgtcttccggcggaagttttatatctacatccagtcctgcatctttaaaataccctttttcctttgctacatagagacccgtatgattggtattcggggtccaatctagaataaaatcaatctttttcaaaccacttgacgattgcttgacagaattttgacaagcactcaagacaacaaatcccaatattattgagaaaaataaacctattgactttttcatcattcatacctcttttacatttttgtcaattttgttttacaagctttacaagtttgtcaaccctttctccattttagaatgtttttttctaattggtcaacgagaaacataccgagcaaactaatagcagaaatcaatacaatgatcgcaaacatcgtatcatactgaaataacttcttcgattgaatcatatagacccccaatccatcaaaacctcctaaccattctgaaacgactgtactgataaaagcataggaaacgctcacacgtaaacctgcaaaaaaataaggaagcgctgcaggaattttataatggactaaggtctgaaagcgattggcttgcataatctgaaacaatctcagaatatcttgatcgcaatgccgaaaaccatctaacagactgactacgatgggaaataccaccgtaataatgatcaaaaccagttttggaagcataccataaccaaaccaaagaaccaggataggggccaaggcaatcgtcggaatggtttgaataacaaccataaaaggatagaccagatcattcacccattgaaaactatccatgagaatcgcaaagccagcagcaagaagaacccctataacaagtccgatcaaggccacttgaagggtagacaaactgtgatgaatcaaaagagctctatctcgtacaaaggcattcccaatttcaagtggcgttggtaatacaaatttggggaggatatttaaaaatcctgctaactgccataagacaagaagactgctaaaacctgcaaatcctatcaattgttttgaatatctttttacaagagacatcgtaacctcctttctaacaaataaaaaacgcctccaaaataggagacggattgcacaaggtcactcataacgaaaaatacatttcatttatttcctacgctggcattacccagatcaggtgcggtcgaagcttacacttcctctcagactgtacacagactcccatatgtatttattataataactgatttagacgataaaagcaagaaattaatccaaataacgaattaaattcttctctgttaaaatatctgaataggtgtaagactccacgtaggtattagctggttcacctggtaagctattgtcgttcgtatactcgataataaataaagaaggatagacctcaatcaagcgtccaaatttatttttttgacgtttccgtccattttcaagtgtcatttcaaccacttgtccttcatgagccttgatctcttctttaatttttttcatttttgcaacatctgtaaatgcatcactcatcttattgatcctctctctttgaaatacttgagaatttattgtattccttttggaatattaattggactgtcccacgcgcaccagaacggtttttctcgataatcacttcaaccgtattattgggcattccatcttcttcctcttcaccagctcgatcataataatcatcacggtacaagaaagcaacaatatccgcatcctgctcaatcgatccagattcacgaatatcagaaagaacaggacgtttatcttggcgctgttccacgccacgtgacagctgactcaaagcaataaccggaacttttagttcctttgccaaaatctttaactgacgagaaatttctgaaacttcctgttgacggttttctcttccagtccctgtaatcagctgcaggtagtcaatcagaataagaccgagattccctgtttcctgcgctaattttcttgctctcgaacgaatctcagtgatccgaattcctggggtatcatcgatgtaaatactcgcattggctaaatttccttgagcaatggcatatttccgccattcttcatccgtcaattgacctgtacgaatcgaatgggattcaatcaagccttcagctgctaacatccggtcaaccaaactttcagctcccatttctaatgagaaaatagcaactgtcttatccaactttgtcccgatattttgagcaatatttagagcaaaggctgttttacctactgcaggacgagctgctaaaataatcaactcttcctcatgtagccccgtcgtcatatggtccaaatcgcgatagcctgtcgcaatacccgtgatatcagaggtttgaagcgagcgggcttctaagctaccaaagttactattcaagatgtctcgaatatttttaaatccactacgatttgcgttttcactaacatcaatcagagctttttcagcacccgcgatgatttcatctgaaggacttgcaccatcataagcttgattaatactttctgtcaatcgagagatcaaccgacgtaggacagctttttcggcaacaatcttcgcgtaatactccgcgttagctgaagttggtaccgaattaatgacttctaccaaataggaaagaccgccaatattttggagatctccttgactatctaaaatatttcgaacagtcgtcgcatcaatcgcatccccgcggtcagctagatcgatcatggccttaaaaattaaacgatgtgaatacttaaagaaatccccaggctcgatatattcacgaacaaagaccaatttcccctcatcaataaagatggcccccagcactgattgctccgcctggatatcctgaggttgtgttcgtaattcctctatctcagccataaaaaaacctttctatcgatcgtgtttacccttcgtttacacgaatattaatcacacctgtaacatcttgataaattttaacaggaacatcaatcaaacctgttgaacgaattggagaggcaacttgaatatgacgtttatcaattttaacaccaaattgtttctcaagctcttccgcaatttttttattagtaatagatccaaaagtacgaccatctggtccaattttttcggtaaattgaacaacggtagcttcttcttccaatttcgctttaatcttttgcgcttctgctaacaattcagcatgtgctttttcttctgacttttgctttccacgaagttcgccgattgcttgggcattggcttctttcgcaaggtttttcttgatcaaaaagttttgtgcataaccagtaggcacttctttaatttcgccttttttacctttaccttttacatccgctaagaaaataactttcattctacattctccttttcaataattacttcgttttcaatagtctcaatcagttgttgacgaatactcatcaaatcttgaccctcaatttgagaggctgccgaattaaaatgacctcctccaccaagttgttccatgatacgctgtacattgactttgcttcgacttcgtgcagaaatcgagatggtcccactttggttgcaggcaatgacaaaggtagcttccacttcagacatggccaacatactatcagctgccttactaatagttactgaatcataggctttagtcgtgttggcacaagctaagatgatatgtggcaaaatcttttcacctgttaagatcagctcgttcacttcgcggtactcgtcaaactgaattgcagaaatctcttgaatggctacgctatcactccctctcgagcgaagatagcttgccacatcaaaggtccgactcgtaacacgtgcagagaagttcttagtatccagcatgatcccagccatcaagacacttgcttgaattttcgttaaccgatttttcttcgatttctggaactgaatgagttcactaaccaattcactcgcactacttgcaccactctcgatataagtgatcagaacattttcaggaaaatcatcatcacgacggtgatggtcaataactataatctgttgaaattccttatagaattctttagatagggtcaatgctgttttagcatggtccaccataatcagcaaggagcgatccgttaccatttgcaaagcttcctctacagtaaggagttttgtaacctgctcatactctagttttgcaatcgctcttgaaatatcactagccattgcatgcgggtcatagaccacataagaggaagccaaaatattgcttgagaaaaactgcattcccacagacgctcctaaagcatccatatccaagtttctatgtccaacaatgaagacttgatcaacggatttaatcttatccgaaatagctgtcatcatagcgcgtgtgcgagtccgagtccgcttcacagccgaagcagttcccccaccaaagaaaattgggtttttctgttcatcattttccttgacaaccgcttgatccccaccacgaacttccgcaaggtttaggttcaagagagccactttaccaatttcatcatgctctccatcaccgtacgagaatcccatacttaaggtaataggtagctcacgatttttagcttcttcacggaattgatcgatgactgaaaattttgattccatcaactgttctaagaccgtgtagtcagtaaacaaatagaaacgatccatccccacgcgtctgtaaaacatatggtaattagctgtaaactcttctacaaagttggcaataaaactattgatattgctaatatcagagtctgaaatgacatcctctagatcatcatagttatcaacagaaataataccgataacgggacgagttgtcaccaatcccacagttgcttcatactcactggaaacatcaaaaaagtaaacaacactagacgtctgatcaaagtaaacggaatatttcttatcggctacagtgacaaaatgacctttatcctcaaacagagtgttgagtaactttttcaatgattcaacatcaaagtccccatcatctgttgaaaaaatcaattcagcataagggttgaaccactctacttcatttgattcttcattaattttgataactccaacaggcattttatcaaggagggatgctaatccgctttctgcctgatggttaacatattgtatttgttctaattcatctaactctgaaatttgtaactggtattcaaataaagcaatcaatccagctaagactaaaaaaattgcaatgagagttacatagcctttgccaaagattcttaaaaaaattgctaaaattgcaaatgaaataaaaccaattaacacataatggatgaacgataaacgaaattttttcatcataaacctcttctcggaattataccataaatagaggtaaaaagcgaggtttctctctatattacagagaagattgacccgtaaaaagctctctctatgcttcactactttgtaaacatcgtttacagatgtgtaaaaagcaacaaaagatttcaatccataaaattgaggctgaaacatcatctcagccccattttattagtggtttgctttgtttttggagatgctccgagatttaccttctaagtaaaccattaaaatagagatatccgctggattgacacctgagatacgacttgcttgaccaatcgtttctggattaattaatttaaatttttgacgcgcttcggttgcaatagagtcaatatcatcccagtcaatattcgcagggattcgtttttcttccatacgcttcattttttcgacttggtccattgcttttgaaatataaccttcgtatttaatttcagtttcaatcaattcaatgattttatcatccaattcttcagctgcaggaccgataaattctaccacatcttggtaagagacttctggtcgtctcaagaattctttagcagtgacagcatctgtcaatggtttaaagcccattttagcgaccttctcattggtttcctttacaggctttaacttaatgctatccaaacgcttcatctcattttcaaactgatacttcttggtttcgaaacgttgccaacgttcatcatctaccaatccaattgctcgtcccatttctgtcaagcgcatatctgcattatcatgacgcaaaatcaaacggtattctgcacgacttgttaacaaacgatacggttcgatcgttccctttgttaccaagtcatcgatcataaccccaatatagccatcactacgtttcaaaatgagttctggttttccttggatttttagagcagcattgatccctgcaataatcccttgaccagcggcctcctcataaccagacgttccgttggtttggccagctgtaaagaggcctgaaattttcttggtttccaaagttgcgcgcaattgatgaggcaaaaccatatcatactcaatcgcataacccgttcgcatcatttcagccttctcaagtcccttaatagaatgaacgagatctcgctgaacatcttctggtaaactcgttgacagtccctgaacatagacttcttctgtatttcgtccctctggttctaagaatagttgatgacgctctttgtctgcaaaacggacaattttatcctcaatggacggacaatagcgaggacctactccctttacaacccctgtaaacataggggcccggtgtaaattattctgaataatttcatggctatacccattcgtataagtcaaccaacaaggaacctgatcctttacataatcttcatcacgcgatgtataagaaaaatgatttggagcttcatctccaggttgaatttccgtttcgtcataattaattgacgatgcctttacacgaggtggtgtccctgttttgaaacgtccaatttctaatcctagctgtttgagattatcggctaaattgatagaagctagactatgattaggccctgacgaatacttgagatctccaatgataatttctccgcgtaaagctgtcccagtagtgacaataacagcctttgccccatactcttggtgagtcgcagtccttacaccaacaaccttaccattctccaccaaaatctcatcaatcatggtttggcgaagagttaaattttcttggttttcaaccgttttccgcatttcttttgagtaaagttctttgtctgcttgagcccgaagtgcacgaactgcaggacctttaccagtattgagcattttcatttggatgtaggtcttgtcgatgttctttgccatttctccaccgagggcatcgacttcacgcacgacaatccccttagcagaaccaccaatagagggattacaaggcataaaagccagcatttcaatgttaatagtcgcaagtaagaccttacaacccatacggctagcagctagagaagcttctactcccgcatgccccgcaccgattacaatgatatcgtattcttcaataaaattatatgtcattttttctcctatttctcaagatggatgtgtcgtaattttccgtcccattctggtagggatgattttaaaaaggctggtttcaggtcaacagtgtgtaaatcatctaaagcaatccaacggcaaggtaattgctttgtatcttcctgcatgaccaaaggtgcatcttctagcaagtccaccaaataatgaaattcaatgttatggtagtggattccagcttgttcaaagtgattttcaaccacgaaagctaacggacctgctatagatgtgataccaagttcctctttgacttcacgaactaccgcatcttctgtagtttcattgacttgaatagcacctccgattgtataacagccgtcctcatcttctatgacgaacaagcgattatcttttacaatcaaagcagtcgctctcacaccaaaaacagtagaacctattttcgtccgaaaatcctgttgcctcattttacttcctttcgaaatcacacaaaaatagtcaaaactctgagaagtgcaggacaaaaaagcctgcaacatccatgagctttgaccatcatttctattgcttttattattgtagcaaattgagaaaatttgtcaatctaaatatactgacaaacttttccatcccgataagcattgtcaatcaagccaccgcctagacactcttcaccgtcgtaaaagacaacagcttgtcctggtgtaatggctcgttgaggttcggcgaaaatcacttctgccttgtcacctttaacgtgtacagtcaccttggagtcaggctgacgatagcggaacttagctgtacactctaatgtaaactcttctggcatatttcttgtaaagtgaacttgactagcttgtaaacttgttgacatcaatgcttcatggtagaagccttgaccgacataaagaatattttgactgaggtctttaccaactacaaaccatggagcattgtctccaccttgttggccaccaattccaagtccaccccgttgaccgatcgtgtaatacatcaaaccagcatgttcacccatatctcgtccatcgatggtcatcatttgacctggttgggcaggaaggtagttccctagaaattctttgaaattcttttctccaataaagcagattccagttgagtctttctttttagctgttgccaatccagcttcttcagctagacggcgaacctcaggcttttccaaatgtcccaatgggaacatggttttttgaagttgttcttgtgacagttggcttaagaaataagtttgatccttcccgttgtcaacgccacgtaacatatggacaatgccatcctcatcacgcgacacgcgcgcatagtgccctgtggctacataatcggcaccgagtgtcatagcataatctagaaaggccttaaatttgatttccttattacacatgacatccggatttggtgttcgaccagctcggtattcggcaaggaaatattcaaagacacgatcccagtattctttttcaaagttgacagaatagtaaggaatgccaatttggtctgcaaccgctgctacatctttgtaatcttctgtagctgtacagacgccattttcgtctgtgtcgtcccagtttttcatgaagatgccgatgacatcgtaaccctgttgctttaataataaagctgttacagatgaatccacaccaccactcataccaacaacaacacgtgttttcgagttatcactcatagatttctcccatcttttcgtttctcacgattgaaggtcgtggtttgcttcaacgattgaaggtcgttttgagcagttaccattttaacacgctttatattagaaaacaagcatcttactattctttttgttgatcaggatcgatgggtttacaagtctgtaaatttaaaaagagtcctattaaagaactcttttcaaacgaatttaataccagccatttgctaaccagaaatttttagctgctgaccatgatccataacggttgacaacatattgattggccactttttcttggtttgcaggtgataaatcaccattcaaataagtgatagtcaattgataacgaccataatattggccattttgtgctgtataactaccacttgactctttttgggcaatccattccttagcagctgcatcttccgcactcaaaccatctgaagcagagatagtagttgttgcttgtgtagtatcaatttgactagtagtagcttgctccgtagttttctgcgttgtatttgcatcttcaatctcaagaacttgaccaactgagatgagattcacgttactaatcttatttttcttagcaattgcatcaaccgttgtgttcttctctttagcaatagctgataaagtatcacctgatttgacagtataagaatctgcattcgctacaattggaaggaaaagtcctgcaagtaaactaagtccaatgattcgtttcatcatttgttttttattcattattatgtactcctttattggtatacctctatactacacaagaaatatttcatatttattgaaattatatgtcaaatatttcagtcagatgttagaaatactaaaaatccaggataatataaatgctttaagccccctttaagatttctcagatatttcgggaaaaatagaagaaatcatcagccatatctgatataatgaagtaaagtgatcacaaaggagcagagcatgaactctttaaaattccaatcagtttttgatattattggacctgtgatgattggcccatccagtagtcatactgcaggtgctgttcgaattggtaaaattgtttcttctatctttggagaggagccaaaagaagttgagttccaattatttaattccttcgctaaaacctatcgtggtcatggaacagatttagccttagtagcaggcatcttaggaatggacacagatgatcctagaatcccagatagtctaaaaattgcacatgaacgaggcattcggattgtttggtctattcaaaaagagagcaatgctcctcacccaaacacaacaaccattactgttaaaaatgatcataaaacgatttctgtcactggaatctcaattggtggtgggaacatacaggttactgagttaaatggctttgccatctcgctaaatatgaatactccaaccattatcattgttcaccaggacgttcctgggatgatcgctcatgtgacagaagctctttctcgctatgatattaatattgcacaaatgaatgtaacacgggaaaaagctggagaaaaagcgattatgattatagaagttgactcaaggagttgtgaagtagcgatcgaagatatccgtaaaattcctcatcttcataatgtcaactttttcaaataaggagctcatatgttttattcaattgtagacctcgtagaacaagcaagcacacaatacgaaggaaacgtcgcagagttaatgattgcaactgaatttgaactaactggtcgtgaacgagaagaagtcctacgattaatgacccgtaatttagaagtgatgattgattctgtaaagttagggttaaatgaaaaccactctcgtagtgggttaaccggtggggatgccgcaaaattagatcgctatatcaaatcaggaaaaacgttatctgacttgaccgtcctaaccgcagcgaagaatgctattgctgtcaacgaacacaatgctaaaatgggactggtctgtgcaacacccactgcaggatctgctggctgccttcccgcagttctcactgcagcaacccaaaaattagggttaaaccgtcagcaacaattagattttttactgacagctggggcttttggtttagtcatcgccaataatgcttctatttcaggtgcagaaggtggttgtcaagcagaagttggttctgcttcagctatgagtgcggcagcattgacactagctgctgggggaactccttatcaagcgagtcaggcagtctgttttgtcatcaaaaacatgcttgggctcatttgtgatccagtggcaggactcgtggaagttccgtgtgtcaaacggaacgcaatgggagcaagctatgcctttattgctgctgatatggccttagcaggcattgaatcaaaaatacctgttgatgaagttattgacgccatgtaccaagttggttctagtcttccaactgcctttagagaaacagctgaaggaggattggcagcaacaccaaccggacgtagattacaaaaagagatatttggggaataatatgcaagccttattttttgacttagatggaacattagttgacagttccaagggaattacagagagctttcaacatacattcgatactttgaaggttcctcaacccgatctcaaaaccatccgtagttttatgggaccacctttgatttctagttttgaagctactcttcctgaagctttggtagatcaagcagtgactatctatcgccagtattatcatgaaaaagggcaatacaaatcaactctatttcctcaaatagttgaagctttgaaagcaatacaagatgaaagcattcccctttatataactacttcaaaacatgaaccagttgctttacagatgtgtcaagatttaggtatctctaaatactttaaaggaatttatggatcaagttctgatcgtacccacaaagccgatgtcattcgatacgccttgtcaatcaatgaccttccaaaagaggaaacagtgattattggagacacaaaatttgacctcattgggggtcaaacagttggtataaaaaccatggctgtcacttggggttttggagatcttgaagaactacttctttactcaccagattttatttgtcattctccacttgatatccttgaggcattaaaaaaatgaggctgggacaaaagtcctagcctctcaattatttttggattgtcgagcaagacgcagtggttgagtgggctctactacgctgatttcatcagcttttacagccctactcaactgtgcggaggtgggacgacgaaatcgaattctaacgaattaccgatttctgtcccactatcattttttaataaccccaagctgacaaaccttgtgagttgtatgcattatatgctgcctggatttgatcatcaactgttgcagttgaaccccaacctggcattgtttggaataaaccacttgcaccagaagcatttgctgcattcacctgaccatttgattcacgggcaatgattgcttcccaagtagaggcaggtacacctgtcatctcagccatgcgagaagctgcatatgctccttgctcaccagcagtattaccatttgatagaacaattccaccatttgttgattgtgcagaagtcactgtagcatttgctgcataagttgtttgtttttgagcagtttgtgctgttgcagttgctgtaggtacactttcagcaggttttgcctgctcttgcggagcaaccttatcaaccattgatttagaacgctcacctaattcaataatttgtcctgcataaattaaatcttcattggtaaggttgttagttgaaataatattttctaataaagtgttattttcaagtgcaatttttgatagagtatctccagacttcacttcgtaagtttcagcattcactgtagcaataccagaaatgaaaagtgatgctgctgaaattagggaagtaactgtccattggaactttttactgttcatgaatcctattctcctttcgaacataattctataatacacataaaatgttacaattcgttataaaatatattacaaatgttacaagaatatgagaatttaatgtaaaaagcgccatatatagcgctttttctttatttttgaatcaaaatggctccctttatccattttttagataaaaaacgaataacatcaggcatagaataactagtaatgctaaggtatcttttaatctccactgtaaactccgatagcgcgtccttccttcccctcctttgtagcctctcgcttccatcgcaatcgcaagtgcatctgcacgtttaaaactagaagcaaatagaggaatgaggataggaataaaggaacgaatcctttttaatagatttccttctccaaaatctacaccacgcgccctttgagcattcatgattcgattcgtatcatccactaaagttggaacaaagcgcaaactcatagatagcattaacccaatttcatgtgctggaaccttaatcaattttagcggtgtgaggatcttttcaacagcatctgctaaacttaatggtgtcgtcgtcactgttaaaatcgtcgaataaaaaatgattaaaataaacctacaaaatatgatagcagcttgcatcaatccttgatcggttaattttaaaaaccaccattgatacaaaattgttccttgagaggtcgcaaataattggaaaatagttgtaaaagcaatgataaaaatcattgattttaagcctttgacataaaaactaaccgaaatcttcgttagatacattaaaacaaagatgaaaccaaagagcaggaggtttgtctgcaagttattggcccaaaacagaagaaaaatgaacaaaaacattgagagcaacttcccacgaggatctagttggtggataatggagtttccaggaatataccttcccaaaatcatattattcatgaagtaacagctcctttagttcctcaattttgattggtagtctgcccagagaaagccctcttcgtttcaattgaagagcaaaattcgtaatttgtggaactcctaattgaagtttttgtaaataatcaacctgttgaaagacttcccttggggatccttttaggacaagttttcccgcttccaaagcaaatacggtatctgcaaaattggctacatcatccatcatatgagttaccagaactagggtcatcccatttttatgtaatgcctcaaacagcgccatcaattcctttctcccagcaggatctaaccctgctgtcggctcgtccaatactaaaatctctggttctatagctaaaatacccgcgatcgcaactcgcctcatttgtccaccagatagttcaaatggacttttatcatagatagactcttctaaaccaacgatcgctaatttttctttagctatttcctcagctttgtccttaggtaccccaaaattctgtggtccaaaggctacatcagctagaacagtttccgcaaatagctgactttctggaaattgaaaaaccaaaccgactttttttctcaggcacttcatttcttttggctcagaattgttatctaaaacaaaattttcaaattgaatcgttcctttagtcggacgcagtaaaccatttagtaattgcaacaaagtagacttgccactaccagtatgcccgatgatggctgtataagatccatcttttatttccaaactaatatcagaaagcgcctgcccttcaaaaggacttccctcttgataagtataatagacattctttaaagaaattcccatagttggtctaataactcactttctgttagatagtcctgctttagcggaaaatgcgagctgagagattcttggacctgcttactaaaaggcttatctagtccaatctcattcagatcatttcttgaaaacaattcccgtggcgtcatagaagactctagttttcctttttgaaacacgagtgttcgatcacttaaggcaatttcggataaatcatgggtaatggagataatcgttaattggaactttttctgaagttctctcattactgccattaggtcctctcggccttccggatctaacatactagttgcttcatcaaggataataatagttggtctcaaggcgataatacctgctatagccactcgttgcttttgaccacctgacaaacgagatggttcacgatctttaaacttcagcataccaacttggtcaatagccttttccacacgttgaagcatttctccccgtggaattccttgattttctaaaccaaaggctacatcatcttctactgtcgcaccaacaaattggttgtcaggattttgaaatacaattccaattttactacggatttcccatatagtttcacgagtcagtttttttccatcaatgtaaatctcaccagactcagcttccaaaagaccatcaatcaagcgtacaactgtagatttcccactaccattgtgtccgacaatcgaaagccactctccttgtttcacgtgaaacgaaaccgtgtcaatttgatattcttctactgttttatcgtatcgaaaggatacattttttagctcaataatctgtttcatttatttaaatgtgtctttaaagagataactacttcccttaaagtagtcgtaaccagaataaattgtgaaaatcaatgcaatataaagcaacacttgccctggaagagtccaatggcaaagcaaaaagataatggcaaacatttggctaaaggttttaatttttcctggcatagctgcagcaagaactgtaccacctgtctcaacaagtagaagacgcaaaccagtaacagctaactcacgacaaatgataacggctgcaatccaagcaggaaccatttttaattcaatcatcatgataaaggctgacataaccaataatttatccgccattggatctgcaaatttaccaaaattactaaccacattccattttcgtgctagaaagccatccaaataatctgtaatacttgcaattgcaaaaataactgctgctacaatatgtcctagataagaatgacttaaacttaaaatagcaataaaaataggaatcatcacaacccgaattaatgtcaatgcattaggaatattttcttttttcatacttcctccaaaaaataaactatctttccatctattttacagatgctgtaaatccataaaaatatacgatataaatcacaaaaccaagaatagcaaagctaattagtagataatacaagattggtaaccagcttgctttctgtcttaatttccttgaatgaagctcttcgtcatctacaaggatttcttcatcaaataacaactcttttccttcacgaaaagctgtcaatagaatggactcatctaaccccaaagcccatgatagcttttttagatagatctgggcataaaacggacttggtagtagatcaaactcatcgttttccaacgcttctatataaggaatttcaatggctgtcttatttgacacgtcctgtaaacttaaatgtaaatttactcttgacagtcttaatacctgaccaattgttctcttcttcattttttcccttcttgatacattgtttactacttttgaaaaatcatatagtcaaccatctcagcctgatcaatgaatttatgacctaatttgatgatatcttgtaaactaatactttgtaaaatctttggaagatcataagatgtgctaccgtctgaaaaataatcaaactgagttgcactatactcaagcgaatttaaaccttgtaagaaatcaccaaacatttcgcttttaatcgtatccaaatgttcctgattcacatctggatccttatcaaattgtttgatagctgacctaaattgatgagataaggagactggttctttggtatccattgtcaaaataacaaaatgaaataattcttcaacctccacttcgagtgtcaatgagttgtcaatcttccctgcttcatataaactttgaaaccgttgcgaagtccaaccaaacatcatcgaaaatagtaattttaacattaatttatagcgaaatttttcctcttctttaatgtcatcatttccccgaattccaattgccaatttaggagtcgccacatccattctgcaggattgattcagtttcacttcgtttttttctacaggaaaacgttccatcttgatcgaaggaagttgggaaatttgatcatattcttttaaaacttgtaatatcggatcaacatcgaattttcctatcactaataagtgcatttgagagggatgatagaatagatcaaaattttcatggagattatcgattgtaatatcagaaattgagtctcttgtcccagcaatatcatctgctaacggtgttccaggatataaattttctaaagcaccaaaaaacaatcgatagtctggactatcttggtacattccaatctcttgttgaatgatttctctttccttagatacagatttttctgtaaaggaagcctttgaaaccatctccaataacaattgaatattttcagggacttttgaagttgttgagaaaagataacttgtctttgtaaagcttgtaaaggcattactttccgatcctaaatgaacaaattttgttagataatcttgacctttttcatcttcaaatactttgtgttctagaaaatgagcaattcctgcaggatattgtctttcatcaccattcactagaattcgtgtgtccactgaaccaaatttggttgtgatcattccataggtttcataataatcttcttttgggattaaatgaatggtcaatccgtttgacaagcgtgtaaagtagacctgctcgcctactgattcatagtatttttctttaattttcaatctttacactactttccttccataaaataaacagactgtaaattaattgtttttgccgtctcaataatttcttctttactaaccttattgatagattctaaccactcttctagagaaagaaccttctttccaagcatcgttttcagatattccctttcaatcagggtattttgtcgatcctgtgctaataaggtcgtatttatcaacatttcttttgtcaattgaagctctgactctgtaaacttgcctcgttttaaatcattcaactgtttcataatcaaagtcattactttggtacgagatcccttatcaatgcctgcaaaaactctcataaagcctgtaaaaatatcaaaatggctagagatggtataagcaagaccttctttctcacgaattacttgaaaaagtcttgaatgcgagaaagctcccagcatcccatttaatacaactagtgggatatggagagattctccatactgggtagaaaaatgataacctaattctaaaatagattgttgattttgtttttgctctaacttttctctaacaacatttgtaaaaggttgttgatagttgacagacaaattgttatcacgtggcttgaattcaaactggttcactcgatccacaatagcgacctcattaaaatcgcctatgaaaaagaagtcaatgttatctaattggagcatctgatgaaactgttcaagagaactttgagctgtctcttgtctcactaaatcaactttccccaatcttgacatcccgattgtttcgtcttcaaaaaatagttgattcaattgcccatgtgcataataataaggctcttcaatttccgactccaaatcggaaattgtatttttcttttcaacgtcaaaggtatcactgtcaaagtgatcttctactaccaaaggtaaaaagaagatggtttctataatgtccaaaacctcatcagtaagaacatttttcttgctcaaaaaatcatcgcgcacaaaggaaatattcaaatcaacataatgaacacgccccctcttagagactgacgttgacaattctaccccgtatagactcgctaatttttcacggaataattgtgaagttggatatttttgatttgcagtttccatcatacaagctgccaaaacacgcgcagccacggtattttcatctaatggcgatgaaaaacggaccttaattttattggttttaaatttttttgattgaagaaagtgaagattcacgccctttactaattccattttcatcctcgttctactcaatagtaactttcattataacacgaaatcacactaaaatcctaattcaaactgtgaaaaagcttctcaaatcactcaacattctctaccctagataaactaaaaatatggtataataacacgcaaagaggtgaactatgaattacaaattatttgatgactttattacattgcaagcaatcttaaaagaactcggtattatacagagtggtggtgcaatcaaagcctttcttcaagaaaaagaagtctttgttaatggtgaattagaacaacggagaggccgtaaacttcgtgtcaacgatcaaattaacattcctgaactgagcatgactatcaccattcttgaaccttctcaagaggaaatagaagagcatcttaaagagaaggaagaaaaggaacgtgttgctgaacttgtcaagcaactcaatcaacaacaaaagaaacaaccgacaaagactaacaaaaaagaaaaagcaattcgctttcctggtatctcctaatgtggttaaaacagttatccattcaacattttcgtaattatcaagaacttgaagtcgagtttcatcctggattaaatattttcctaggtcaaaatgctcaaggaaagaccaatattctcgaatcaatttattttctagctttaaccagaagtcatcgaacacgaaatgatagagatctcatctattttgaatccacagattttaaagtttctggtcaattacaaagagaaactggtcctcttccattggaaatctccttgacaccaaaaggtcggataactaaggtaaatcatttgaaacaagccaaattatcgaactatattggccatatgaatgttgtccttttcgcacccgaagatttgcaactgatcaaaggatcacctgcaggacgtcgaaagtttattgacattgaattaggtcagatgaaacctctctatttatccgacttatctcaatacaaccatgtactgaaacaaagaaatagttacctaaaaaattcggaaaaaattgatgctacatttttggaagtcttagattcacaactagctagttttggaagtcgcgtcatctatcatcggcttgagtttattaataaattagaagctaaagcaaaagaaaaacacactcgactttctgacaacaaagaagacctatcgattcaatatcagtcaactgttttttctgaagatagaaatgatatagaagagcagtttctctctatgttggaaaaaaaccgtcagaaggatatttttagaaaaacaacaagcattggaccccacagggatgatttggcattttttatcaataatatgaatgctacctttggtagtcaaggccagcatcgaagtgttgttctctctctaaaattagcagaaatcgaattgatggaagaaatcacaagagaaaagcctattttattacttgacgatgtcatgagcgaacttgacaattatcgtcaacttcaactacttgaaactatctctaataatattcaaacatttattacaacgacaactcttgatcatttaaaagaactgcctgaggagttgaaaatttttactattcaagccggtcatatcaaaacagcatcttgacaataccgtcaagatgctgttatttttgtttacaaatgtgtaaatttattgtgctgagtagttaggcgcctcgtttgtaatttgcacatcatgaggatggctttctttcaatccggcaccactcatttcgacaaattgtgcatgatcatgtaaatcttgaatagttgctgcaccaacataacccatacctgaacgaataccaccgatcatttggaagaccatatctgctacagatcctttataagcaacgcgtccttcaattccttcagggaccaatttattggcttcattgacagatccttggaagtaacggtcgctagaacctttcttcattgctgcaatagatcccataccacggtatgttttaaatttacgaccttggaagatttctgtttcacctggtgcttcatctgtacctgcaagcattgagccaagcataaccgcatttccaccagctgcgagtgctttgacaatatctcctgaatacttgataccaccatcagcaatgatcgtttttccatattcacgagctacagcggctgcatcataaatggcagtcacttgaggaacaccaacccctgcaacaacacgagttgtacagattgatcctggaccaattccgaccttaactacatctacccctgcatcaaataatgcacgagcaccttcagcagttgcaatatttcctgcaatcaaggtacggtctggaaagtgagcacgaatttctgcaatcttacgaagaacacccgcagaatgtccatgagcagtatcaatgacaattgcgtctgcaccagcttcaaaaagagcttctgcacgttcaaaagtatctgaagtaacccctacggcaccagccacaagcaaacgaccaaattcatccttagccgcatttgggaactcgataactttttcaatatctttgattgtaatcaagccagaaagacgaccattttcatctaccaatggtaatttttcaatacggtgctcttgtagaatgcgttcagctgtttccaaatcagttccaaccggtgcagtcaccaaattttcacttgtcatatgatttgaaataggttgattgtaatcagaaataaaacgcaaatcccggtttgtaaggataccaactaatttacgattttcaagtgtttcaacaacaggaacaccactgattcggtatcgtcccatcaactcatctgcttctgcaattgtatgagacggagtcaaatagaacggatcaatgataaccccattttcagagcgttttactttgcgtacttcatctgcctgttgctcaattgacatgtttttatggataacaccaagtccaccagcacgtgccatagcaattgccatttgactttcagtcaccgtatccatagcagcagtaatgattgggatattcaagcgtaaattacttgctaattgtgtacttaaatctgcatcattaggcaatacgtgactttctgctggaatcaaaagcacgtcatcgaatgtaaaccctttttttaaaaactttgtgtcccaattagacattagctggatcctcttttctttttatttgagcaaggctcgaatttttattgttaatatcataccattctatggcaatttgtcaatcatttattggtaaattatcaatgagcagtaaagaaatgttcgctattaatgaagtcgttttattttttaaaataggtaattcccatcgcagattttacttcatccagtgtttgagctgctacatttcgagcgcgctcacttcctttttcaagaatagagtagacttcgcccatatcctttgcaaactcaagacgtctttcacgaatcggtcttaattcacgatctaaaatttctaaaagatatcgtttggtctttacatcaccaagtccaccacgttgataatgttctttcatttctgcaatttcagctgcatcttctggacggccaaatacatccaggtaatgaaagaccatattgccttcgatttttcctggatcctctactttaatatgatcaggatcagtatacatactcatcacttttttctttaaagtatctgcatcatcagctaggtaaatgccattattcaacgatttagacattttagcatttccgtctaaaccaggtaagcgccctgctgcttcattttcaggataaatcccttctggctccaccaaagtatctgtattgtaagcatggttaaaggaacgaacaatctcacgagtttgttcaatcattggcttttggtcatttcctaccggaacaaaattcgctttaaatgccgtaatatcggctgcttgcgaaatagggtataccaaaaatcctgtaggtatactctcaccaaaacctttttgagaaatctcggtttttacagttgggtttctttcaagtcgtgccaaagatacaagattcatgtagtacatggtcaattctgccagttcaggaatctgactttgaatgaaaatcgttactttttcaggatctagtccagctgcaagatagtccaaagcgacatttccaatagactccacaatcgtttttggatcttttgcatgatccgtcaaagcttgctggtctgccaaaaaaacaaacatattatattcgtctttattctgtagcaagacccgattttttaaagaaccaacatagtggccaatgtggagttttcctgttggtctatctcctgtcaaaatgatgggttttgtcatattcttctccttaatcgttatccctatcattatagcactttctggttcaaaatgttagtctatcctctatgtttgtaatgaattaaaagtttactactttgtcaacttaatttacagggttgtaaaaataaattgacactaaaaaagttgaattttcccctattttctagtaaaattaagacattatagaaagaggagaaaatcattgcttacagtatcagacgtctcactacgttttagtgatcgaaaattgtttgacgatgtcaatatcaactttacagaaggaaatacatacggtcttatcggtgccaacggtgctggaaagtcaacctttttaaaaattttagctggagatattgaaccaacaactggtcatatttctcttggccctgatgaacgtttgtccgttttgcgtcaaaatcactttgactacgaagacgaacgggtcattgatgttgtcattatgggaaatgaaaagctctacaacattatgaaagagaaagatgctatctacatgaaagaagatttctctgatgaagatggtgtccgtgcagctgaacttgaaggtgaatttgccgaactcggtggatgggaagcagaaagtgaagcatctcaattgcttcaacatctaaatatttcagaagaccttcattatcaaactatgagcgagttagccaatggggataaagtgaaagttctcctagctaaggcactttttggtaaaccagatgttcttcttttggacgagccgaccaatggattggatatccaatccattacctggttagaagattttctgattgattttgaaaatacagttatagttgtatctcatgaccgccactttttgaataaagtctgcactcatatggcggatctcgactttggaaaaatcaaactttacgtcggaaactatgatttctggaaagaatcttctgaacttgcagcaaaattacaagcagatagaaatgcaaaagctgaagaaaaaattaaacaattacaagagtttgtcgcacgtttctcagccaacgcttcaaaatcaaaacaagcaacttcgcgtaaaaaaatgcttgacaagattgaacttgaagaaattgttccatctagtcggaagtacccatttatcaactttaaagcagaacgcgaaattggtaacgatctcttgacagttgaaaatctttctgtcaagattgatggagaaaccatccttgacaatatcagctttatcttacgtcctggtgacaaaaccgcccttatcggacagaacgatattcaaacaaccgctttgatccgtgcattgatggatgatattgaatatgaaggaactgtcaagtggggagttacaactagtcgatcttatctaccaaaagacaacagccgggattttgcaggtggtgaaagtattcttgattggcttcgtcaatttgcaagtaaagaagaagatgacaatactttccttcgtggtttcttaggacgtatgctcttttcgggtgacgaagttaacaagtctgtcaacgtcttgtcagggggagaaaaagttcgtgtcatgttgtctaaattgatgctcctcaagtcaaatgttcttgtactggatgatccaaccaatcacttggatttggagtctatttcaagtttgaatgatggattgaagaattttaaagaatcgattatctttgccagccatgaccacgaattcattcaaacactcgccaaccatattatcgttctttcaaaaaacggcgtaatcgatcgcattgatgaaacctatgatgagtttcttgaaaatgaagaagttcaagcaaaagtgaaagaactttggagtcaatcataaaaataaagagccctgaaatcattatttcaggctctttcagtagaaatatatgaataaaacaaagctaaaaacatccctttttatagtatcttctttcctgattccagctatcataatgttctttatttacctttcacaaggaatctactggaacagtgatacatccccattgttaggagatggttatcatcagtatgtcatttttgatactacacttcgaaatattttacatgggacagatagcctattttacagttttcaaagtggactaggtattaatttctatgcactcagtagctattatctaggaagtttcttttctcctcttgtatacttctttaatgtacaatccatgccggatgctgtttacctcatcactcttcttaaatttggagcaattgggctaagcgcttatattagtctacatggaatcttttctaaaatccctagatgcctggttcttactctttcaacctcatttgctcttatgagctttgccatcagtcaaattgaaatcaaaacttggctagacgtttttatcttggcaccattaattctttatggattcaaaaaactaatttacaatgagggagaggttctctactttatcagcttaaccagcttgtttatccaaaattattattttggatttatgatgtctatttttctcattttatggtacttgacacaactgtcatggaacatcaaaaaaattggaaaacggttctttcattttgtgattgtatctcttttatcagttataacaagtcttgtgatgttatatcctaccttcttagatttacgcactcatggagaaagtttttcaaaggttgacagtatctttacagaaaaaagttggtatcttgatgtatttgcaaaaaatttcattggaagttttgacactactaaatatggatcaattccaatgatctacgtgggattatttccacttctattagcgatcacctttttctttgtaaagtcgatcaagtttcacgtgaaactttcttacattatactcttgaccattcttattttgagttttcgttttcaattattagatctcctttggcaaggtatgcacgcgccaaatatgtttcttcatcgatactcttggatcttttctttgacgattattctgatggcaggagaagtactaaatcgaatagaggagatcacttggattcgttttagttttgctaatttcctcctcattctaggatttggagcaactgtcctttacagcaatcactataaatttttagatgcagtcaatttcattgttacttttgaatttttaattgctttctatttggtctgtttaggatttatcctaaaaaaaataccgcctagacttttctatctttcgatcctttttttctccatctttgaattatcggtgaatagttattatcaaatggaaggaattgcgaatgaatgggtctttgcttctcggtcatcctacgaacgcgacttaaaagccatccaatccttagtaagaaggaagacagactcaaattatcggactgagattctacagccacaaacgggcaatgatagtatgaagtatggttataatggaatttctcaattttcatctgtacgaaatacggatgcgagctcgacattggacaaacttggatttaaatctgaaggaaccaatctcaatcttaggtaccaaaataattctattttaatggatagtctatttggtgttcgctataatttgagccaacaacctgttcaaaaatttggatttaaagagattgcaaccaaaaatggagtctcactttcagagaacgaatatgccttaccaatcgcctttttgtcagcaaaaacttataaaaatgcttcctttacaaatttaacactggataatcaaacacgattcatccatcaaatcacggatgaaaaatataaattttataagaaattaaatattctgtcgcacacttcacaaaatactacatcttcgttgcaaactgcaaaaattgaagaagatagtcatctatcctacgcaagtattcaatatgaagtaatggttcctgcccatagccaactatatgtcaatgttccaaatttacaattttcaaatgatgatcggaaagagattgaaatcagctacaatggacagaaccaacgctatactattgataacgcctttccattcttttcgattggccattttgacacaggggaaacagctactattcgtatgagttttccagaaaattcgacagtctcctttgatacaccagaattttttgctctggatcttgaccaatatacacaggctatcaccaccattcatcaacaagaagttgccattcacaaaaataaaaatagagtggtagcaacctataacgcagatagagatactacccttatttttacacttccttatgataaaggctggtcagctaaacaaaatggaaaatctatccaaattcatcgcatccagaaaggattgatgggagttcatgttccaaaaggatcaggaactgtcaccttaacatttattccccaaggcttagttgagggaggcatttcctttttcgttggaattattctctttttcctctacgaatggagacaaataaaaagacgaaaaaactaaggaatataaatatcgttcacttataaataaaaggctaggatagcaattatcctagctttttcaaaataaaaaaacacccaaatgggtgctatactagctccgccagtaggactcgaacctacgacatcatgattaacagtcatgcgctactaccaactgagctatggcggaatgagatatagtccgtacgggattcgaacccgtgttaccgccgtgaaaaggcggtgtcttaaccccttgaccaacggaccatatattcattaacagaacatatctcattatatcagaatataactaattgtcaagcactaaattctaaattttgctcttcaattaattttttgacacgtttgatattacttcttgaaattggacaagaatatccttctttcaacagcagctgtttctttttcttatccattccaatgatcatacttctatttacgataaaagattgatgaggactaaaatatctctcctccacatccttctccaagacatctgataaacttcctgcaatttctttttgaaaatttttcccaactaagtttaatttataagctgaaccaaccgtttcgatataaagaatatccttaaatggaattttaatttttttatctttaaaatcatactcgaaataatctgtcaaatcatcatttccaatttgaatagttgtcaagtactcaatacactccttaatttttaatctaaataaatcttcattcaaatttttatcaataaaatccaaggcagatactttataacgataggtaatagaagcaaattccgattttgtagtaataaaaacaataatggcataaggatttgcttctcgtattttttgagcaatttctagcccacaatactcattgtcttggatgtgaatatctagaaaatataattggtggatctcagaatgctggatataattttcaaattctgtaattttaccggtagaaatcacttcaagtttaatttctaattccttagcaatttctgcaatatgtttttctacccgtatctgttgagagagctcatcttctaataaaaaaatcttcattcttgttcatatcctccaatcttcaaaacttgtaaaaaacgatttccttgcaattccgtttctaaaaacatcgttccataatttgctaagatttttctcacattatttaatcctagtcctctgttttctccttttgtcgaatacccttcttcatatatttttcttatatcaaaagtgatttcgtttgtcgtattatgaatcactaagtaaacaatttttgaaatggagaaaatagcaatatgaaccttcttttcttctgcttcttttgaagcttccaaagcattcgtcactagaatcccaacaattctcacgatatccaataaatcgactggtagttgctcaattggttcacttgtttcaaaggtcatttctaccccagcatctcttgcatccaaccaacctcgaatcaaaatacttcgtaaagcagaatctcttatattgactaaattaaatcctgataattcttctgcgttaatttttttataacttttttccaatacttctctatggattcttcgaatttctggaatattttcttcctcaatggctagtgacatagaaataactaaatttcctaaatcatgacgaaaaccccttacaatagaatagagactttgaatctcagccatataacgactcatttgttgctcagaaaattctttatactccagttccaaattttttcgatactgatctcgctcaattttcatgtggaataggctgactacaaaagtgaaaaaacaaatcgttgccaacatacttccaaaatttttaaattgcgcttgttcactaatccataaagcaaaattgatcactacaaatatagcaaaatagacagaaatcaatatctttaaatacttttcaaattcttcttcataaaaaggagtgaaatcaaattcaaataagtcaattaacttcaaaatgattcctaaagaaaccaaacgaataaacatattataaacaatcgaatgagctgctacaaaagcatctcctattactgaagagacaataatcgtcagaaatgttgctgttccttcaaccgctaaataagtaaaaaaagaataaaaaatagaacacaaacgattcgttcgattggcataatgataataagggtataaataaaccggccacaagagcatattcaaatcggaaagttgaatatttgaaaataaagtcatgtctaaaaatactaaaaggctctcaaagagtaaaacaaaggtactcagaagaaagatatacggaaatcgatgttcttgatatattttttcgtctactaatgcaaacgtcagaacaatgatcccccctaaaataaaggacaagactaatgactgaaacacacaaactctcccactctgtttttctattttattatactctggtattattataaaaaaataaatttttatatacaaaaattataatataaaatagaataaaattaaagggatcagatgaaattgtaatgtttttaatgaatttgttacacgattgaaaactactttacatgatttttataatttaaaatcattactatctagggattttaactatttttaagaaaattatgacttgtttttttaaaaatttttatctttctattccatttttacaaaaaataagcaatgatgaaataatatacattttgtaaaaaaaaaaacgtagtacaaaccacgttttttatttgatcccagcaggattcgaacctgcgaccgttcgcttagaaggcgaatgctctatccagctgagctatgagaccgaacttacttcattttagcagaaaaaggaaggagcgtcaaggttatttatggtaaggactcccctgttgaatcatgaaagcacgatagatttgttccaccaacactaatttcatcaactgatgaggaagagttaattgaccaaagctcattaatagatttcctctttttttcacttcaggagacagaccaagactgcctccaataacaaaagtaaggtttgaataaccagatatcataatctggtcaatcgtttgactaaatttctctgaaggaaattgttttccttcgatggccaatacaatcacatattccttatctgaaattttagagagaattcgttccccctctttttcaagaatttgttgattttcgagttgactagcacgatctggagttttttcatcaactaactcaacctgttctacttttgcaaatcgaccaagccttttaatatactccgcgatcccatcttttaagtatttttcttttaattttccaacggttatcaattttattttcattcccctattgtagcataattcttcaattccacaaataatccacagctatagaaaggaaatctattctataaagtcctttttaaagccatttctcaactaatttctacaagttatccacaaattgtggataactttagttatttaagatataattaagaaagtttgtctatactttagacaatttgatagccttaggaggaaaatatgaaatcttcatctaatttactgaaaaaagttgggaacatagccctcatttttgttgtaggttttctaggtgggattcttggaacctttttaaccttaaaaacatctcattcttctacttcaaatactgaaagtaagcaagtccactcaaccactgttaaaacagcttataaaaacacaacctcaactagtgaggccgtcgataaggtgaaaaatgctgtagtttctgtgattacttattctgattcttcgaatcaaggaatgtttgaaaaagaagaaaaccctgactcacaaatttctagtgaaggttctggggtcatttataaaaaagaagggaaatatgcctaccttgttaccaatacccatgtgatcaatggtgctaaaaaagtagatattcttttagcagatggtaataaagtccctggagaagtagttgggtcagatgtctattctgatattgcagtagttcgaattagtgcggataaagcaaaggcagtagctgaattcggagattcaaaccaattaacggtcggtgagactgcaattgcaattggcagccctcttggaacagattatgctaattctgttacccaagggattatttccagccaaggtcgcaatgtgaaattgaaagccgataatggacaaaatatctctacacgcgctctacaaacagacgcagccatcaacccaggaaactctggaggtccattaatcaatattcaaggacaagtcatcgggattacctcaagtaaaatttcaaataacggacaaacttcagtagaaggaatgggatttgcaattcctgcaaatgatgttgtcaatattatcaagcaactagaagaaaaaggaaaagtagttcgaccagctcttggaatccaaatgatggatttatccaacctttcaacttctgatttaagccaattaaaacttcctgaaaaaatctctggaggagtactggttcgttcaacacttgaaaatatgcctgcttcagataaattgcaacgctacgatgtgatcacaaagatcgacgatacagatatcgagtcaactgcagatttacaatctgccctctattctcaccaaatcaatgatacgatcaaggtcacattctatcgtgatggaaaacaacaaacaacttctatcaagttaacaaaatcaactgaggatcttagtgagtaattcttatcctcttgacatacttgtaaacacacctttacgaatttgtaaaggtgtgttattctattcataagatggaaaaattagaaaagatagcggtaaaggacattcgaactaatcctttccaaccaagaaaagtatttgatcaagaaaaattagaagaactggctcagtcaatcaaagaaaatggcttaattcaacccattattgtcagaaaatctccaataattggttttgaattgcttgcaggtgaaagacgttttagagcttcaaaaattgctggattagagcttgttcctgcgattattaaagagttaacggatcaagaaatgatgcgacaagccattatcgaaaatcttcaacgagaagatctcaatccaatcgaagaagctatatcctaccagaaactagttgatcatggctataagcacgaccaaatcgctcaatttatgggaaaatctagaccctatatcagcaatatgcttcgcttgttacatctagctccctctgttcaagaagcagtcattcaaaatgatatttcttcggctcacgctcgtgttcttgttcctcttgatgaaaaagagcaatgcttttggttggagcgaatcaaacaggatcatttaaatgttcgaacattagaaaacaagatcagttcaaaaagaaaacagaaaaataaaagagtaaaagaaaacttcctactagaagaggaacaacgattgaaaaaaatattaggaacagatgtgacgatacactcctcttctcaaaataaaggaactatccaaatttctttttcaagtcttgatgaataccaacgaattatcaacagcctcaaataaggctgttatttttatttttgtatcgacaagcttttccaccataaaaatcttttacaaatagtagaagaacaaggatattctctagttatccccactttgtggataacttttaaaaacaatgtgaattcaaatccacaacttgtggaaaagttttaaaatataatttacttcctaaaaatttagcctgtggaaaactattttcgtttgtggtagaataggagtaagtacgatttgatacaattccagaaaaggaggggagtcttata

SEQ ID NO: 208 - DNA, 8225 bp, Streptococcus parasanguinis
  source 1..8225: mol_type = genomic DNA
cgaaaagctgggcaaaccaacgatatcaaggatatgcgcgaatataaagacgcgatggaatatattgagaatcgaagatcaagtcagattgttaagatccagcgagaagaacaagctcacgaagaaaagatgaatgagttaaacgagcgattgagacaacaagaagaaaaatttcaaaagcgagaagaggcttttgaggctagtaaaaggcaacaagctagagagattaagcggattaacgatgagatagtgagcaaatctgaagaacttgatctcgaaatgatcgaagatgcaacagtcgatgcgatgctgaagatgcagctgatcgcggataagccaatcgacgataagcgcaactatagaatcgcagaacgagggctaggcaattcaaaacagcgctatgttatggtcccagagaaagatttcgatgatttggcccgcagggctaatcctggtccactgatgcagttgttgaaagattttaaagatcatgttcttggtttaggaattgtaaagcgtctgagggctacgattgcaaaactaaaagaagaaatggctagtctaatcaaagaaaatgataacttgtctaaagaattgacctctatgattgaggatagaaacaaatacaaatatcagttgcaggatcaagagtattatctgacagatcaagaacgtaatgagattgctgagaagattatccagagaaaagatctcgaattagaggatggagatagaacatttgagaaagatgatcttgattttagcagatagataatctacttgtgacttcagtaaaagtatgtgtttttttggttgcacttaagcaatttatacagtttatctagtttaactgctacatgaaatacacattgagttgctactgccatttcactttactttcgctaacttacgtatttcatctacaccaaaagcggacggctttgagccggctttctattggcttcataagctaaattacagaattcatctagtgtaaatagccatcatctaccctctagctttatactctcttataggccagctgtgttgcgttcaaaacaaaaagtaaaacgtaagatcacaaatgttggatttactgctaacaaagagggcgcaagccctctgggagcgaagcgaccgagagccgaagggctctaaggcgaagcctcaaaaaaatcaaacgaaggtgtagattttggggcgaaacgaagtgagacccttatttatatatattttatatatatgtttaataatatatttaacacctccgcggatcttagagtcccaagggttttcgagttttatgggtgtagaaatgtcggtttatgggtgtagaaatgtcggtttatgggtgtagaaatgtcggtttatgggtgtagaaatgtcggtttatgggtgtagaaatgtcggtttatgggtgtagaaatgtcggtttattaagaacaaatataaatatttgctttataaagtttttggtggtataattaagaagaaatgaaaaggagttcttaatggctaatgaagtagttaagcatcacaatgatttaaacacggttatcatgagaaaatggacagcagaagagatgaatttcttttttgcgattattacaaaagcaagagacaaaggcacttctgaccttatttttgataaacatcaactggcagaattggcaaactattctatccaacacaataagcgattttacgacacaatggacagtctagcaaataacatctctcaattaagatacatcgagaaaacaaagaattctattgaatacatgccactttttacacgtttcaaagttgaatgggaagatgatttgtcagacatgcaagcccaagtttctgtatcccctctttttgagtatattttgaataagttatcagcaaattttactcaatacgagctacaagagtttacttctattcgctccacttatgcaaaaactgcttacagactgctgaaacagtggcgaacggttggacgaaaagagttcaagattgatgaatttaaacttttgttagatatgccaagtagctataaatcaagcgaaatcgatagagcggtcatcactccgattttaaaacagttgtctccctattttgaggatttaaaagttaaaaaaatcaagtcaaaaaagcgtggaaatccagttttaggatatgaatttacttggaaaaaagaagtgactggaacgtatgatccagacaagtttaatagaccaaaaccagaaccgaaaaagtctaataaagcaaaatcaaacaaaaagacaagcaagacaaacgttcctgaatgggtaaaccctgattacaagaacgagacaacagaagataaaaagctggtgctggaagagtacaaacaggtctgtcttgcaatttcagacgctaaagacgaggacgaattagagcgtctaaacaaacgaaaggacgagttattaaaacaattaaataacgcagaaccgtataagaaataatgaaagaacagaactaataaatgattatggaaagaggtgccagggtgtcagaaaaaaataattatcaaaacaatataaagcattttagagttagagaggggttgacacaggaagaattagctaaaaaaataaatacttcaaggcaaatgataggcttaatagaaaatagtaaaacaataccatccgtagaaatagctttaaaattagctaaagttttaaaagaacctatagaacatctttttagactctgaaagggctttactatctgtgcttttaatgatactatagtgttaaaataaataaaaaggagattgcgtatgttgttcttttcagctgcttttgtagtcggttactatttcggaagaaaattctaactagtctaatagcctagttatagactataaaacagacgaaagcacggttgaataaaccatgcttttttcttatgtcgctttttaacgttatataatgcgttttaagaacctaaaaggtgggggtggtatatttaccctaccagatcatttaaattcattttctatagctattgataaggaaatgagagcttagaatcgattttaatgaaatagttgtacagaaaatgtatagaacgtgatataattgatatacataacgttatgtatagcgtatataatagatgaaaaataggtgagataaatgagtgtacaaatcagcatgcgtgtatcaaaagagcaaaaagaaaagcttgtggagttggcgaaaaagcagaataaaagcctgacgcaatatgttttagatgcatgccttgtagaagatgtcgatacagttgtagagagtgtagcgcattctagcgaacgtgtagaaaagatgctacaagatcaaatcgatcaattacgtgaggattttgagcgtgaacgcactcaactagtcgatcaaatcgatcaaaaagacaagcagattgctgacatgatcgaaacaagcaacagccagctgcagcttattggagctctcacgatgaaaaatgaaacattattgttagaaactaaaaaaagctggtggcaacggttgttttctaaaaaatagccttcaattggtagaacatattgaaatgttgttttgtaaaacttaaaagaagaaagatttgatgcccccaatatcatcatgtttcaacgtagctttaattttctttgaataatttcctaaaaccaatctgactttttcggtacaaaccatttgtcaaatcttttgttaaacatttacattcttttttacactatcaatggttattggaattagcaatcaaaaaacggcaatcagcattcactaaattaccgttttttatttaaattctattactattaactacctaatactactagttaatactactagtagtattaagattattactaattatcctgaggccatcgtgtataaattgacccaaaacgtcaaatccgttataaattccgtaataaataaagagtcctaaaattatagatgaaataataatacttgcacaaataaaatatgtacgttttttttcattcataatatcgattatctcctaagttagtatagactaatagttccgttttgattaaatgggactctataataagttttgcctccaatactacctccaaaattaaaaccagctcctaacaactctgctttaatttgacctgaagcattactgtctataactgctgttaaagtaccattataagcatactttatacttgttgtagggtatccatttggagaccaaacattaacatttttcccttcaataaatgtgtttgcaataaaatttgttattcctaggtaataacctttaactgagttaatttgacggaaagaaccattattatatagctcaatatttacacttaattgaagtgtagttctagcaaatgttgcacttcttatcaatgtatgtgaagtaattgtagagcgagaaaggtctgggataagttcaatagtttcaacaacttttccagtatcgcgatcaataacagtcgcaacttctgtgacccctgattttgaatagatcacttctggattaggaacattataatcctcaacagtaaattgtaattcattgaattttacggtgaggtcaccagtagtgtcagcgcttacagaaatagggagacaaaataatgctaaacaactaaataatagagtaaatagtatttttttcatgttaatcacctaccgagatttcataacaaaattggatattaagaattgataattatagtttgcacattggaatcatccactttcttatataaatattaattagttacggtaattttttattctaaaaattttatctttagtaacaacttgttcttattttattatactttaatttgaatgaattttcatttttttatatgtgaaagtagttccagttttcttatctcatttacttttaatttcttgaatatgttagtaggtgtttctttcttttatgtaggttggttaaaatagcttcatctgtttcttatacgtttttcagaaattgtataaatttcgttatcacttctcttaccaatagcaatgacttcaataatttcaattgcattgacagtttcatgaaaaacaattctcaggcccagttttttgtgttttaacttcctgtaacctgctaaattaccgtgaagagcctctccagcaagcatcccttgattttctaacttgataagtgactttttaacatgaagacgttgactattatctaatttataaaaatcatcttgtgcttcaggtatcaattcaactttataactcaatcccaaccatcctctacattttccaaaccttcacgccaatttgaaccaagaaattcatcgacagttaaattttttcgtgcttcaagttcaaatggaattttacgatcacgtctgattttattgaaatataaattaattgctgtagtatagtcaagtccaatctcgtttaagacctcaccaacttcctgttttaattcagagtcaatacttagattcaatcttgcttttgtagttgtaatagccatttaaatcacctcttcttttttgtgtatattatacacaaaaaagacgattttttcaaactgttttttctcaatgataatttttttgcataaattgtcaaaaaatgatgctgagatagtcattctgagctgatttcagtttagagggcggacaatctatcgctaaaattacttacagccccaaccgttggggctgtttttttgcttattgttcaactttccgaaaaagatcaatttttcggaaagttgttttttgtaaaaaaaaggcgttttttcgcaaaaagatggcatactactttcgtaagaaaaaactagcttaaaaagttagtcagaaagaaggtaagaaaaaatgaatttgtccgaaatgtacaaagaatttgacgacttgatgaggaaacgtaacgaatatgttgtatacgaaaaaccgctagctgaaatgaataacggtaaaattgtctctggtagcaagtatatcgttattgctcctactgctgtcctggatcaactagaaaaagaggtatttgcgttagaaaaaaacgcaaacgaaggtcattcaaacaatgctatcacaattggccgtagccgattgcgctctgcatcgtctctctctttatccatcaaagattctaaacatacgaatacaacgtcaattgaaaagtgtcttgagctgctttatagaatttataacaaaagtactgagaaagagatgagcgaacatcgtgtcattctgcaagaattacatcttgccaaaaataaaacaactgacgcagaagagttagaaaagttggctgcatctcaagattttgaagttgaaagacacgaatcaacgctaaaagagttatccgaaaagtatgatacagcaattgaactgctatctaaatatgatggagatagagctgtccgagtttcttcgcggactggtagcagttatcgtcttaattattacgatcatgaaaaggataaacgaagtcatgtgtcgcttaataatttagtgatgattgataacgatgcttcaaatatgtcattggataatacagcaaaacggaaaaaaagaaacgatacgaaacaaccaataattgagctcaacactatctcgatttatgagccattggaagtctcatatgaggaatatatgtcgaatcgcaaacactaactacagtaatagcctagttaaaataatgatggtagggagttacaagctctctttttttgtctgcgtgattcacggacaaatcgcacgctggttcgtgcgacgggcgaagaccatttttgctgataattttagcgcagctgaaattattttgttagcaaaagatgggcaagcaaaaattgcagggggcaattttttcggtgcgttgttcgcgccgaattttttcgagtccactttgtgggccgaaaaacgcagtgaattttttggaccatgatgggccaaaaaaggggtgcaacccatggccctcggcagagcgttttacctttgtacgtcgcgaagcgatgtcaaaggtgcaaaaacgttactctttggtaaagagtaacagaaacgccccgctaaatcccgactttggattatgatttttacgtctgttttaaatcgacaatatagacgcaggatagcgatagcgctgcatcttagcccgcttttcgggctaccttgcgcattttttaagttggttaatggttttatatactggaccacgtttaagcccaataatgggcctatatgttgtccatcttttatataaataatggacttatacatgttccatgattttatcatttcgtggtctactatatatcccattattctatattttcatggtcctatatatagtccattttctactcaaatcatggacaactatgtagaccattatttgtatttttcatggacttatatataaacccacgaaatggacaaaacatggatctctatatctatccatatttttattaactagattattagcctagttaaattctttgagtgttgcgttttttcttctgttttgtctttttttttaacaaaagatggcatactattagtaactcttaaaatagtaaatcttaaaaggtaggtttaaatcatgaataaaacaatgacattatccttcaaaactaatccaagacaaactaatattcgacacaacaatcgcgaactgacggaaaaagagtttatgagcgacgctcacaagcatatcgaacgtgaaaaatcaaaatacaatattcagattttcaaacgtgatataaaagacgtttatcacgaactctttgatgatgcgctgaatacttacaacgcaaagcaaaagcggaaagatcgcaaaattgatgactactataaacacgtccagaaatccaaaaatttggaccttcagagggaattcatcgtgaccgtcggaaacaaagctgattgggaaagattgagttttgaagaaaaacgagaagtgggagaggctctagaacgttatgtccgcgattttaacgaacgacatagtaatatgaccatctataatgctgtcgttcatttagacgaagctggggcccctcacgcccattttaacgtggtcccaacggcaactggatacaaaaatgggcttgctgtgcaaccatcgtttagaaaggctctggaacaggaaggcttcggcccatctgggagggagcagttcaaagcgtttagagatgcagaaattcatcgtctgcatgagtttgtccatgaaatcggaatcgac
